United States Patent Application Publication US 2023/0390346 A1 - sequence listing, part 2

SEQ ID NO: 3 - DNA, 1000000 bp, Bacillus amyloliquefaciens
gagccgtttacgtgggcgagcggcattttatcaccgatctattgtgacaaccgtctgacattgtcgtatccaaaagtgagaaatgatgtggcggacgggctcggcaaactgctgaaggagcatttccccgaggcggagatgatcgcgggcactgcaacggcgggcattccgcatgctgcgcttctcgcagaccgtacaggcgcgccgatgtgctacgtcagaagcaaaccgaaagcgcacggcaaaggaaatcaaatagaaggcgccattaagaaaggacaaaaaacagtcgtgattgaagacttgatttctaccggaggcagcgtgcttgaagctgcggcggcccttcaaagagagggcgcggaagtcctcggcgtcatttccatttttacatacggactgccgaaagcaacagaagcctttaaaaaagcgggtcttccttattactcgttaaccgattatgacacgctgattgaagtcgcgcttgaaaacggtacgattcattcagctgacattgaaaaactgaaatcatggaaactgaatcccgagtcaaaagattggtttaaaaaataatgacaataaaaacaggcctcagggcctgttttattattcctatcaaaaaactcgggttgacttctgttagaattgtgctaaaatttagtacaaatctaaaaagcttatcaagagcggctgagggactggaccgatgacgcccggcaacctgcgtgtattgcaaggtgccgcatccagaaaaatgcacagcattttgaagataagggctataccgggtcactgtctttcattccgctggattgaaagttttttatatgaaaaaaagattgagggataagacaaccggcagagaacaacaactgtttgattgtctccgggaggaggaaagaaaaaatgctaacgtatgatacatgggaggaaccggcgattacatttccggaagacgattcctataaaggcgcgctgtccgttttaaaatgggcatacggccactacggagaccagcttgtttacgcgtgcagcttcgggattgagggcatcgtcctgatcgatttaatttctaaagtaaagaaagacgcggaaatcgtgtttctcgatacgggtcttcactttaaagaaacatatgaaacgatcgaaaaagtgaaagaacgttatccggggctgaacattatcctgaaaaagcccagccttactctcgaggaacaggccgaggctcacggagataaactgtgggaaagagaaccgaaccagtgctgctacatcagaaaaattctgccgttaagagaagcgctcgcagggcatccggcatggctgtccggccttcgccgggatcaagggccgagccgggcgaatacgaatttcctgaataaagacgacaagtttcaatcgattaaagtatgcccgctgatccattggacatggaaagacatctggagatatacttccaagcatgagctggattacaatatcctccatgatcaggggtatccgagcatcggctgtgaaccgtgcacttcacctgcgtttaccgcggaagatttgcggagcggcagatggaacggcatggcgaaaacagaatgcggactgcatgaataaaggagctgcccgatggaattagccgctattttattctgtctgttttttgccatgaatatcggagccagcggagccgcggcatcaatgggagtcgcttacgggtccggcgccgttaaaaagaaaacgtatgcgctgatcatctgcgcggccggagtcctgtcaggggcggttatcggcggcggtgaagtcgttaagacgatcagcggcggaatcattcccgaacaaaccattacgctcaccattgtctgcattataatcggagcggcggcgctatcgttattcacggcgaatgtgctcggcattccgctgtcgacgagtgaggtcactgtcggggcgattgtcggtgtcggcgtcgcgtacaaagtattgtttttacagcatcttttggtcatcgtgattttttgggtgctcgtaccgttcgtcgcgttctgtttcacttttctcgtatcgaaggtattcagttctctgaatattcgagtcatttcgaaacggaaacagaagattttaggaattgtgctgctttttgcggggttttgggaagctttttcagccggaatgaacaatgtcgcaaatgcggtgggccctttggtggctgcgggcgtactcagcgtgtcaaaaggaacgctgtacggaggcatctttgtcgctctcggcgctctgcttttaggacgcaaagtgcttgaaaccaacgggaaaaagattacgaggttttcagccggagaaggcatactgctttcaggaaccggtgcggggcttgtcattatcagttccgtcttcggtctgccggtcccattggcgcaagtcacatcatcatcaattatcggtatcggaatggccaaaaacgggccgaacgtttttcataaagaagtcgtgaaaacgatgctcaaagtatgggttgtttcgccgtttttgtcactgtcgatttcgtatctgcttgtctccctgctgttaaaaggagattactattccatctttatgatggccagcgtgcttttggcagctggcggagccgccagtctgatgaaagccatccgaaaagagaaacgctctgtccatgaacaaggcgggggcatttaactattaatctgagtttatttatctgttaactgggaggaatcatgtattatgagtttagcaccgcacggaggaacattaattaatcgggtgaatgagcagtatgatcttacatccgtccacaaagaaattgagcttgatttgatttcgttcgctgatttagagctgatcgggatcggggggtacagcccgattgaaggatttttcacagaaaaagattacgtatcagtcgttgaaaatatgcgtctagcatcagggttgtctggtccctgccgatcacgcttccggtcgattcagaaaaagcggctgagcttgccgtcggcgacacggtgaaactgacttacggcggagaaacatacggcgtcgtcgacatcgaagatatttatacgccggataaacaaaaagaagccgttcacgtatataaaaccgatgatgccgcgcatccgggcgtgaaaaaattattttcacgcggcgatacgtatgtcggcgggccgatcacattaattaaaaaagcgtcaaagcagtttcctgagtttacatttgaacctgccgatacaagacgaagcttcgaagaaaaaggctggaaaaccatcgtcggtttccaaacgagaaatccggtccaccgcgcccacgaatatatccaaaaaaccgcgcttgagacggttgacggcctgtttttgaacccgctcgtcggtgaaacaaaatcagatgacattccggcggatgtcagaatggaaagctaccaggtgctgctcgatcattattatccgaaagaccgcgtattcctcggcgtgtttttggcggcaatgcggtatgcggggccgagagaagccattttccacgcgcttgtccgcaaaaactacggctgcacgcattttattgtcggccgcgatcatgccggcgtcggtgattactacggcacatatgaagcgcaagagctgtttgatcaatttacagcggatgaactcggaattacaccgatgaaattcgagcacagcttcttctgccagaaatgcggcaacatgggaacggccaaaacatgtccgcatgacagagaagaccacgtcattctgtcaggaacaaaggtcagagaaatgctgcgaagcggcgtcatgccgccggcggaattcagccgtcctgaagttgtcgaggtgttgattaaagggctgaaaacgaaagaagaagcaggcgtttcttaaggaggaaaatagagtgacaaatcgtgatatcgtatggcatgaagcctcaataacgaaagaagaataccagcagaaaaacaagcataaaagctctatcctctggctgacgggcttaagcggttcagggaaatccacaattgcaaacgccgcagcgcgcgagctgtttgaacaaggctatcaagtcattgtgcttgatggggataacatccgccacggcttaaacaaggacttaggtttttccgatgatgaccgcaaggaaaatatacgccgcatcggggaagtggcgaagcttttcgttcagcagggaaccatcgtcatcacggcttttatttctccgttccgtgaggacagagatcaggtgagagagcttgtggcagagggcgaatttaatgaaatctacgtgaaatgcgacctcgatatatgtgaaaagcgcgatccgaaagggttatataaaaaagcaagaaatggtgaaattccgttctttacggggatcgactcaccgtatgaagagccgaaagcgcctgagctcgtacttgattcaggcaaatttgaacgtgaagaatgcaccggaagactggttgactttgtgaaaaacagcttagcataataggtccaaaaaggccgcgcaatcagccggatatcccccgcaatggcgggatatggtaaaatagctgaagtgcggcctcgcggctgttctgggaagatttcaaaacggatcggggagacatgctatggggaaagtatttatcgttggagccggtccgggagatccggacttattaacggtgaaggcaatgaaagccatacagaaagcggacgttatattatatgacagattggtaaacaaagagattttacagtacgccggagaagaagcggatctgatttactgcggcaagctcccggattttcacattatgaaacaggatacgatcaaccgtttccttgtgaagtatgcgaaaaaggggaaaaccgttgtaaggctcaaggggggcgacccgtttgttttcggccgcggaggcgaagaagcggaggctctcgcgcaaaacgccattccgtttgagatcgttcccggcattacatcaggaatcgcggctgctgcttatgccggcattccggtgacgcacagagaggcgagctccaatgtcgcattcgttacggggcattataaacaagaagacgactttgaagaaaaatggaaagcgctggcgacgggcattgatacgctggtgatttatatgggaattaaaaatatccggcagattgaaagaatgctgctggaaaacggcagagacggcggcactccggcagcctttattcattgggggacgacggacaggcaaaaaacagtcgtctgcaccgtcggcacgctttcagacacagtgataaaagaagaaatcaaaaacccgagtttaattgttatcggtgatgtcgtcaattatcactgcatactggactggtatgcatctgatcagaaaaatccggatttgagcgaggcgttgtaaatgaagcaggcgattttatatatcggacacggaagcaggctgaaaaaagcgcagacagagtcggcggcgtttttaaaagggtgcatgccacacgctgacgctcccattcaggaaatctgttttttagaactgcaggaaccgtctattgaagcgggatttgaagcttgtgtcagacaaggcgccactcatattgcggctgtgcctttgctgctgttgaccgctgcccacgcgaaacatgacattccggctgaaatcgcccgtgcggcggccctgcatcccgatataaaagtgacatatggtgttccgatcggagtggacgatgaagtcgtaaaagccgtgcatcatcgcattgaagataccggagtgtccattgagcaggcgaaagtggtgctgatcggaagaggaagcacagatccggcagttaaaagcgcagtcagtgagattgccggaaaacttgaggcgattacacctgttaaagaagtcatcccttgttttttaacagcatgtgacccgcactataaagaagtgtttgccggccttgaagaggatgacggagcacccgtttttatcgttccatatcttctgtttaccgggcttttaatgactgagattgaacgggaagttcaaaagcttcaaacggtcaatcaaaatgttcatctcgcttcatacttaggttttcacccgcatattaagcaggcgtttttgaaccgtgtgacggaagctgtccgaaaccccggcgggcagtttgattttaaggggggacagtatgctgcctctgcacattaatctcagcggaaaaagaattgtcatcgcgggcggaggcaatgttgccttaagaagactcaaaacagtgctttcggaaggcgcggatattactgtaatcagtcccgatgccctgcctgaaattaaacagctggcggatgaaggacgtatccgctgggtttcccgtaaaattgacatgaaggatctcgcgcccgcttttttcatcattgccgcgacaaatgaccgcaacgtgaatcgggagataaccgagggcgcttctgaaacgcagctggtcaattgtgtaagcgaggctgaacggggcagcgtgtatatgccgaagatcatccgcaaagggcgcattcaagtatccgtatcaacaagcggcgcaagccctgcacatacgaaaagactggctgaggacataaagcctctcattactgctgatttggctgaagaagtggatcgattatttgagaaaagaagaagaccataaaaaacaccctgtctgtcatcaggcagggtgttttttatactgtcctgacagtccgccgaatgtgaaaaattcaaaacgaaagcgggcagtttgaatggtatatgccgacaagcggtcaggattgcgaagtgatgcggaatatgtatgtgatcccgatgccgcctggatttcgcccgcatacaaaggaaaggtcagagacccgcccggatgtgctcaggttcggcgagggaaggtgaaagtatccgccgccaaatcaggtgtgaccgtttaaatcacagacggcccggcggatcatgcagacatgacgggaaactgatcagatactgtaaagatcggttctgacggctgggagagtttcgtctccgtttatacgtaataaaaaacacttccaagccgagtgcgggtttcagcttggaggtgcgtttattttttcagccgtatgacaaggtcggcatcaggtgtgacaaatacggtatgctggctgtcataggtgacaaatccgggctttgcgccgtttggctttttcacatgtctgatttttgtataatcaaccggaacggagccggaatctttcgctttggaaaaataagcggcgatcgcagccgcctccagtatggattgttcatccggatcgctgcttttaatcacaacgtgggaacccggaatgtctttcgtgtggaaccataaatcatccctcgcggcagcttttgtcgttaagtactcattttgtttattgtttttgccgacaagaatcgtcaatccccgtgaagattcatattgctccaaaacaggaacgtgctgcttctgttttttctgtcctctctgctgtttcggccgcagatatttgccttccacaagctcttcccttatttcgtgaatatcctttgtggaggcggaggagagctgctggatcagctgatcgaaataagcgatttcctcctcggccagacggatctgttcttttaccacctcgacggaattcttcgccttttgatactttgtaaaatacatctgcgcgttttctgacggtgttttgttcggatttaaagggatggtcaccgtcttactttcttcatcataataattgatgacttccgcttctttgtcaccttttttcagcatatacaaatttgccgtcagcagttcgccgtatagctggaattccttcgcattttctgagtagtcgagcgtcttttccagcttttttatcttattggcattctttttccgttcatttgcgacaaaacgctcgagatcctgagcctgctgtttgacgcggtcgcgttccgctttgccgaaataaaaccggtccaacagctcactcagtgagtgaaaggtgcgctcctctccgtttacatgtgtgagagacaggagataaaagtattcctttccgccggctgtcgtaatgttcggtgtaaacctgcaatctttcacggcatggaacatttcaatcagcgtcttcggcagcgttattttgttagcgagacccgctctgtgcacggcttcttttgcaaacagcggagaaacaccggagaaatgtctgacgatctgctggtcaagccgtccttcctgaaaactgagataacgcaaaacgtcctcttcatccgcggcaagcggcgaaattttttcctgagcgggaggaagcttgtaatcatagcccggcagaacggtccggtagctgttcatcgacggagataaatgcttcagcccgtcgatgatggatccttctccgtcagtcagaataatattgctgtgccgtcccataatttcaacatacagcgttcttacggtttcgtcgccgatttcatttctgctttttatgcggaatatcataatccggtctaatccggcctgttctattttctcaataaatccgccttctatatgctttctgagcagcatacaaaacatcggcggctcgctcggattttcataggcctggtttgtcatgtgcacccgtgaatagctcggatgcgccgacaataataatttgtggtttgttccgttggcgcggatatggaatatcacatcgtgcttaaaaggctgatggactctcgtgatccgtcctccggcgatccggctgtttaattcatgtgtcattccgtatgtaaacatgccatcaaaagacatataaaacaccctttccttcttcctgcattcgataattatagcatgaaaagggacgagtcagaataagcttgtttacagagtgacatctctaaagcgaggcaggggagtggacgagaagaatgaagtttcatgaaatgggacaaaccgatttgctgaaagcaacaaatacgtccattaaacaggggttgaccgaaaaagaggtgaaaaaacgccttgaaaagcacgggccgaacgagcttcaggagggcaagaggacaccggcgatcgccgtgtttttcgcccaatttaaagattttatggtgctcgtgctgctggcggcaaccttaatatccgggtttttaggcgaatatgtagatgccgtagcgattatggcgattgtatttgtcaatggggttctcggtttttttcaagagcggcgggcggaaaagtctttacatgcattaaaagagctgtcaacgccgtatgtgtcagcgttgcgggacgggagctggaagaaaattcagtccaaggagctcgttcccggcgatatcatgaaattttcaagcggcgaccggattggcgcggatgtgcggatcgttgaagcgaaaagccttgaaattgaggaatcggcgctgaccggggaatcaattccggtggttaaacaagccgataaattgagaaagccggatgtttcgttaggcgacatcagcaatatggcgtttatgggtacgatcgtaacgcgcggcagcggtgtcggcgtcgtcgtcggtacaggaatgaatacggcaatggggaaaattgccgatatgctggaatccgccggcagcctttcaacaccgctgcagcgaagacttgaagagctcggcaaaattttaattatcgtcgcgctccttttaacggtattggtcgttgcagtcggcgtcttacagggacatgatctttacagcatgtttttggccggggtgtcattggccgtcgccgcaattccggaagggcttcccgccattgttacggtggcattatcaatcggcgtccagcgcatgatcaaacaaaaatcaattgtcagaaagctcccggcggttgaaacattgggctgcgcctctgtcatttgttctgataaaaccggcacgctgacacaaaacaaaatgaccgtcacccatatgtggtcaggcggcaaaatttataaagtgtcaggcatcggctatgtgccggagggcgttttcacccgagatgagcgggaaatcaagccgaaagatgagaagattcttgaacagatgctggttttcggcgcgttgtgcaacacatctgaaatcgcactgaaagacggccgttatgtactcgacggtgatccgacagaaggagcgctgctgacggctgcaagaaagggcggctattcaaacgattggctcagcgggcattaccgcgtggttgccgagtttccgtttgactccgtccgcaaaatgatgaccgtcattgtagaggatcaggaaaaaaagcagttcgtcatcactaaaggagcgcccgatgtgctgattgaccgctcgtcacatctgatgcacggcgcaagaagtacgcctttttcaggagaaaagaaagcagaaacggaagcggttctgaaagagctggcgtcgcaagctttgcgtacgattgcgattgcttataaaccgcttaagcccggagaaaagccgacaatggagcaggcggaaaaaaatctgacgatgctcggcttgtcaggcatgattgatccgccccgtccggaggtcagacaggccattaaagaatgccgtgaagccggcattaaaacggttatgatcacaggggatcacgtcgaaacggcaaaggccattgcaaaagatttgcgtcttcttccgaaaaaggggcgtgtgatggacggcaagacgctgaatgagcttacggacaaagaacttatcgaaacggtcgatgatgtctacgtcttcgcacgcgtgtcacctgaacataaattgaaaatcgtcaaagcgttccaggaaaacggacacgtcgtcgccatgacgggagacggggttaatgacgcgccggccataaagcaggcagatatcggtgttgccatgggcgtgacgggaacggatgtggcaaaggaagcctcttctctcattctggtagatgataactttgctacgattaaatcagccataaaagagggacggaatatctatgaaaatataagaaaattcgtccggtatttgctggcctccaacgtcggtgaaattttagtgatgctgtttgcgatgcttctcgctctgccgctgccgctcgtcccgattcagatattgtgggtgaacttagtcactgacgggctgccggcgatggccctcggtatggatcagccggaaggagacctgatgaggcggaagccgcggcatccgaaagaaggagtgtttgcgagaaaactgggctggaaagtcgtatcaagagggtttttaatcggagccgcaaccattttagcgtttatcatcgtctatcaccgcaatcctgaaaatctgccctacgcacagaccgttgcattcgcgactcttgtcctggctcagcttatacacgtgtttgactgccggagcgaaacgtctgttttctcccggaatccgtttgaaaatatttatctgctcggcgccatcgtttcttctgtcttcctgatggccatcgtcatctattatccgccgctgcagccgattttcaaaacagtgccgattacgccgggcgattggatgctgattatcgggatgtctggcatacctacttttttgctggcgggttcacttttgacaagaaaaaaataattccatatgatataatcttaggggtaatagcatgtctattgcccttttattttgataacgggaaagaattgggtgtttcatatgatacggagtatgacaggcttcggcagcgcaagcagcacaaaaggcgatctctcggcaaccgttgaattgaaatccgtcaattaccggttcaaagaagtgaacgcccgcctgccacggcctttgctatatgtagaggataagctgaaacaaacgatattgcagcatatacagcgcggaagagtagagctgtttctcactgtcaacagtgacgcgctcataaaaagaagcctgaacatcgattgggagctccttgatgaatatgtgagcgccgcacgcgccatgaaagagcgctacagcctggccgcagaacccgatgcaatggatttctttagatttgaacatattgcgcagattcacgaagaacagatgcgtgatgacaagcttgaagaagtcatcagggaagccgctgagctggctgtaaaggaactttgtgacatgagggaaaaagaaggccggcttttggcggaagactgctttctgcacattgagcggcttgagacgctgtccgaacaggtgaaagagcgcgcttcggccgttgttattcaataccgcgagcgtctttacgcccgaatgaaggaatggacggaggacgcgctcgacgaaagcaggctgatcacggaatgcgccattttcgccgatcgttctgatataacggaagaaattaccagattgaagagccattttgttcaattccgtgatatattaaaagaaggcggggcagtcggccgcaaacttgatttccttgttcaggagcttaaccgggaagcgaacacgatcggctcaaaagccaatgatcatcaaatcacaaagcttgtcgttgaaatgaaaagttctattgaaaaattgaaggaacaagtgcaaaatatagaatagcgactgtgcgtattgtttacagacggtctcttcaggttacactagagacgtctattttacagggggaacgtagaagatgacgattaaactgattaatatcggatttggcaatatcatctccgccaatcggatgatttcgattgtcagcccggagtctgcgccaataaagcgaatgatccaggatgcaagagaccgcggaatgctaatagacgctacatacggacgaagaacccgtgcagttgtcgtcatggatagtgatcacattatcttatctgccgtccagcctgagacagttgcacacagactttctgtgaaagaagaaattatggatgaagggcaggggtaattgccgcatgaaagaaagagggttattaatcgttctctcaggtccctccggagttggaaaaggaacggttcggcaagcaatattttcacaacaggacacgaaatttgaatactcaatttcagtcacgacgagaaacccgagagagggcgaggtcgacggcgtcgattatttctttaaatccagagatgaattcgagcgcatgattgaaaacaacaaactgcttgagtgggcagaatatgtcggcaactattacggtacgcccgttgattatgtcgaacagacgcttcaagaaggaaaagacgtcttcttagagattgaagtgcagggcgcgctccaagtgcggaatgcatttccggaaggcctgtttatcttcttagcgccgccgagtctttctgagctgaaaaacagaatcgtgacaagagggactgaaaccgacgatttaatcgaaaacagaatgaatgccgcaaaagctgaaatcgaaatgatggacgcgtatgattatgtcgttgaaaacgacgatatccaaacggcttgtgataagattaacgcaatcgttctcgccgagcacttaaaacgtgaacgcgttgctccgagatataagaaaatgctggaggtagaataacttatgttagatccgtcaattgactctttaatgaataaattagattctaaatatacgctggtgactgtgtctgcaagacgcgcgcgtgaaatgcagatcaaaaaggaccagcagattgaacataccatttctcacaaatatgtaggcaaagctttagaagaaattgacgcgggcctgctttcgtttgaaagagaagacagcgaataacaagcacacgtagcaacctatctctacataggttgttatttttttccgtttgggatttgtccaatgctttcataaaggaggagaagacttcatgaaaaaccgaaacattttgctatgcgtaagcgggggaattgccgtttataaagcttccgcactcacgagcaagctggttcaggccggcgcaaatgtcaaagtgattatgactgagtccgcgcgtgagtttgtttctccgctgacatttcaggcgctgagccggaatgaagtgtatacagatacatttaatgaacaaaatccgaaggtgatttctcatattgatgccgctgactgggcggatttaattattgtcgcgcccgctacggcaaatattatcggcaagcttgccaacggaattgctgatgatatgctcacaacgacggtgctggcggctgaggccccggtctgggtggcgcctgcgatgaatgtccatatgtatgatcatccggcggtgaaacggaacatctctgtgctttatcaggacggggtccgctttatcgagccgagtgaaggctatttggcatgcggatatgtcggcaaaggaaggctggaggagccggagcttattgttgagcgtgtcagagagcattttaaggagcctgaagacgatgcgccgctgaaaggaaaacatattgtcattacggccggtccgacgcgcgaagccgtggaccctgtccgcttcttcacaaataaatccaccggcaaaatgggctacgctgctgctgaagccgccgtccgtctcggggcgcgggtgacgctgatttcaggcccggtgtcaatagagccgccagtcgggctgtatcagtttcttcctgtgcaatcggcagccgatatgagagaagccgtgctttctgtgtttgattcatgcgacatggtgattaagacggcggccgtggccgattttacgccggcggctgtttctgatcacaaaatgaagaagaaagacggttcgctcgtgatcgaattcaaccgtacggcagacatactgaaagaactcggcgaacggaaaacacaccagctgctggtcggatttgcggctgaaacgcaagacgtcgaacgctatgcgcgcagaaaactcgaacagaaaaaccttgatatgatcgttgcgaatgatgtgaaagcggaaggggccggatttggcacggatacgaatgtcgtcaccttctatttccgggacggaagaaaacgggagcttgcgcttatgtctaaacttgacgtttcctttgaaatgctgaaggaaatgacagctttgaaagccgaggaccgaaaacccgtatgaatgtagcagaagtcattgtcgatgtcagctccaaaaacattgacagaccctttgattacaaaattcccgatcatttaaaagggatgatcgaagtcggcatgcgggtgattgtcccgtttggcccgcgcaagcttcaaggatttgtgaccggtttgaaagattcgtccgaattaaacggcggctcaatgaaggaagtcgagaagcttcttgatttgacgcctgttctgactgaggaactgatgcagctgtcttcatggctttctgacaaaacgctgtcgtttaaaatcacggcgcttcaggcaatgctgcccgccgcattgaaggcgaagtacgagaaagagctgaaagtcgttgacgaagaagcgctgacaccggacatcaaacagcttttcaggaatcaaaaaagtcttctgtactcggatattaccgatgaaagcattctttcgtcacttcagaaattcgtgcgtaaaggaagcattgatgtcacatataaagtcgcccaaaaaacgaataaaaaaatgatccgcatgattgaagcgggggcagacaaagaagaactcgcccggcacgcagattcattgacaaagcaggcttctaaacagctcgccgtgcttacttattttatcggcgggggagaaaagatttccgcggctgaactttgcaaaaagaccgattccagttccgcgacgctgaaaacgcttcttaaaaaggggcttcttacggaaagctttgaggaggtttaccgcgatccttatcaggacagaatgttcaaaaaaacagagccgctctctcttacagaagagcagcaggccgcttttgagccgattaaacaagctgtagccgaccatgtccatcacgtctttctgcttcacggcgtcacgggaagcggcaaaacggaaatttacctgcaatccattgaaaaagtgctggcaaaaggacaagaagccatcgtgctcgttccggaaatttcgttgacaccgcaaatggtcaaccgttttaaaggccgcttcggctcacaggttgcggtcatgcacagcggattatccacaggtgaaaaatacgatgaatggcggaagattcagcgcaaggaagtccggcttgtcgtcggagccagatcggccatctttgccccgtttgaaaatctcggcatgatcattattgatgaagagcacgaatcttcctataagcaggaggaaatgccgcgatatcatgcgaaggacgtagccatccgccgggccgagcatcacagctgtccggtcgtcctcgggagcgccacgccgacattggagtcatttgcgcgggcgaaaaaaggcgtttatgagctgcttccgttaaaacatcgcgtaaaccgccagctcatgcctgacgtttctctcgttgatatgagagaagaactgagaaacggcaacagatcaatgttctcaagagagctgatggaacagctggaagagaagcttgcaaaaaaagagcaggccgtcctttttctgaataaacgggggtattcctcgtttgtgatgtgccgggactgcggttatgtgccgcaatgtccgcattgcgacatttccatgacttatcaccgctacggacaaaggctgaaatgccattactgcggccatgaggaacctgtcccgggaacatgcccggaatgcggaagcgaacatatccgctttttcggcacgggaacacagcgtgtggaggaggagcttaccaaagtgctgcctcaggcgcgcgtgatcaggatggatgtggacaccacttcaagaaaaggcgcccatgaaaaactgttgtcagcgttcggtgaagggaaggcggatatcctgctcggtacgcagatgatcgcaaaagggcttgattttccgaacgtgacgcttgtcggagtattaagcgccgatacgacgcttcacatcccagatttcagggccgcggagaagacattccagctgctgacacaggtaagcggacgggccgggcggcatgaaaagccgggaacggtggtcattcaaacgtatacaccgtctcattacagcattcagctgacgaaaacgcacgactatgaaactttttttcagcaggaaatggcgcacagacgggcccagtcatacccgccgtattattacgtggcgctggtgaccgtttctcatgaagaagcggcaaaagccgcggtcaccgcagaaaagattacaaactatttaagagcgggatgcgggcctgatacgaaaattctcgggccggcggcttccccgattgccaggatcaaagatagatatcgctatcaatgcgtgataaaatacagacaggaaaacgagttgcagattcagttgaaaaagatactggagcactataaacgcgacattgcgcaaaagcatgtaatgatttcaattgatatgaatccgtacatgctgatgtaacattagtttttggagggcaaaattttggctgtaaaaaaaatcgtcacacacccggcggaggttctggaaacacccgccgatgaagtgacagtgtttgataaaaaattaaaaaaactgcttgacgatatgtacgatacgatgctcgaaatggatggcgtcggtctcgccgcgccgcaaatcggcattttaaaaagagcggccgtcgtggacatcggtgaagaaagcggccggatcgaccttgtaaatccggttattcttgaaaagagcggtgaacagaccggagtcgagggctgcttaagttttcccggggttttcggtgatgtcacccgcccggattacgtaaaggtaaaagcccacgaccgtaaaggaaaaccgtttattttagaagcggagggttttttggccagagccgttcagcatgaaatggatcatttagacggcattttattcacatcaaaaattacggcttactacactgaagaagaactggcagaaatggaaggatgattggatgacaaggatcgtttttatgggaacgcccgacttttcagttcccgtcctgcgcacgcttattgaagacggatatgaagtggttggtgtcgttacgcagcctgaccgcccgaaaggcagaaaaaaaatcatgacgcccctcctgtaaaggctgaagctgaacgtcacggcattcccgtgcttcagcccgaaaaagtaaggctcgaagaagaaatagaaaaagtgctaagcctgaagccggacctgattgttacggcggcattcggacagatcctgcccaagcagctgctggacggtccgaaatacggctgtatcaacgtacacgcgtcactattgcctgaattaagaggcggagcgccgatacattattcgattctccaaggcaagaagaaaacaggcgtgacgatcatgtatatggttgaaaagcttgatgcgggcgatatgatttctaaaatcgaagtggaaattcatgaaacggataacgtcggcacgctgcacgacaaattaagcatagcgggggcaaagcttttgtcagagaccgtcccgaacgtcatctccggaaatattaaaccgatcaaacaggacgaatcaaaagcgacttacgcgcctaacattaagcgtgagcaggagcggattgattgggcaaagcccggagaagagatctacaaccagatcagaggtttaaacccttggcctgtcgcctatacaactttgaacggtcaaactattaaagtatgggcttctgaaaaagttgcggcaaaaactgatgctgcgcccggaacagtcatccgcacggagcaaaacggcattgtcgtcgcatcaggaaacagcaccgcccttttaatcactgagctgcagccggcggggaaaaaacggatgaagggcgaagattttgtaagaggcaaaaatgtgcagcccggtgacgtgttaggagcagcaaatgaagaaaattaatgtccgggagctcgcccttgaagcgcttgagaagcttgagcaaaatcaggcatacagcaacctgcttcttacatcggttatcaaaacgaacacgctcagcgatcaggacagaggactgctgacagagcttgtctacggaacgctgcaaaataaaatcgccttagactatatgctgaagccttttatccgcaagccgaataaggtgaagccgtgggtgattcagctgcttcgtctgtccgcgtatcaaatggagtatttagaaaaaattccggatcgcgccgccatccatgaagcggttgaaatcgccaaaaaacgcgggcataagggcattgcgtcctttgtcaacggcattctccgctccctgcagcgtgagggggcgccgtcatttgctgaaattgaagacccggttctccgtctttctacagagacaagccatcccgaatggctcgtaaaagagtgggtcgaggcgtacggctttgaggcggctgaaaaaatctgccggattcatctcattccgccgaagcagacgctccgtgtcaatcacataaagagcgacagggaaacggtgctgaatgagatggagaatgccggtctggaagcggaagccggagacctttctcctgatgcgattaagcttttgaaaggaagcatcgcgaacacggcatttttccaaaacggccgggtatccatacaggatgaaagctcaatgcttgtcgcccgggcgctggacccgaagccgggcgaaaccgttttagatgcatgcgccgcaccgggcggaaagtcggctcacattgcggaactgatggagaacgaggggagcctcacatcgcttgatcttcaccgtcataaagtgaagctgattaaagagggcgcagaacggctcggtcttacgatcatcgacgcgcaaacgatggatgcgcgaaaagcgggagaggcctttggcgcagaacggtttgaccgtattctcgttgatgccccttgctcaggtttcggcgtcatcagaagaaaacccgatatgaaatatacgaagacgccggaggacagcagacggctgtcagaaatccagctcggcattttaagggaaatcgccccattagtaaaaaaaggtggcacactcgtatacagtacgtgtacaatggatcggacagaaaatgaagaagttatgcatgcgtttatacaagaacaccctgagtttgaacccgatttgtctcttgaaaagcggctgcctgaaaaggcgagaccctttgttcaggatggaagccttcaaattcttccgcattatttcggaacagacggtttctttattagcagcatgagaaagaagggataaaaatgacacaattaaaaaagacaagcgtacggaaagagctgcggactgagcagccgtccatttactcttttgaattagatgaaatcaaacaatggctgaccgagaatggcgaaaagccgttccgcgcagcacagatttttgaatggctctatgaaaagcgggtttcttcatttgatgaaatgacgaacctctcaaaaagcctgcgtgaaaaactcgagagcaattttgtgctgacaacgctgaaaacggctgtaaaacagacatctcaagacggcacgatgaaatttttatttgagcttcatgacggttatacgattgaaacggttttaatgagacacgagtatggtaattctgtatgtgtaacgacacaggtcggctgccggatcggctgcacattttgcgcgtcaacgctcggcggtctgaaacggaatcttgaagcgggagaaatcgtcgctcaagtcgtgaaagtgcaaaaggcgcttgatgaaacggatgaacgcgtcagctcagtcgtcatcatgggaatcggagagccgtttgataatttcaatgaaatgctcgctttcttaaaaatcattaaccacgataaagggctgaacatcggagcgcgtcatatcacagtttccaccagcggaatcattccgaagatttacgatttcgccgatcaaaaaatgcagatcaatttcgcgatttctctgcatgctccgaatacggaaatcagaagccgtctgatgccgattaacaaagcctataagcttcctgaccttatggaggccgtcaaatattacatcgagaaaacaggcagacggatcagctttgaatacgggctgttcggcggcgtaaatgatcaggtcgaacatgcagaagagcttgcagaactgttaaaagacgtgaaatgccatgtcaatttaattccggtaaactatgtgcctgaacgggattacgtccgcacaccgagagatcagattttcgcattcgaaaaaacgttaaaatcccgcggtgtaaatgtcacgatcagaagagagcaaggccatgacattgacgcggcctgcggtcagcttcgcgcgaaggagcgtcaagacgagacgaggtgaagaggttgattacagccttgaaaacagatacaggtaaagtccgccggcataatgaagatgcggcgggcattttcacaaaagaagacgcggtgcttgcggttgtcgccgacggcatgggcggtcatcttgccggagatgtagcgagcaggatggcggttgcggcgatggaagagcagtggaaccggaccgaaacggttccttctctgccgtccgcttgcgaggattggctgaaagaccggattcatgaggcgaatgtcaaagtgcatgaccacgctaaagccaatgaagaatgccggggaatgggcaccaccattgtctgcgccttattcacggggaagtttgtcactgtggctcatattggtgacagccggtgctacctgcttcaagagggggaattcactcagctgactgaggaccattcgcttgtgaatgagctggtcaagacgggggagatttcgaaagaggacgccgagcaccatccgcggaaaaatgtattgacgagagcgctggggacagatgaaaccatcagccccgacgcccgttcttttgaactgtctgacggcgatcagctgcttttatgctctgacggactgtcaaataaaatagaagatcacgagatcaaacaaatgcttcaagccgaatctgatcatcaggaaaaagtagaccttctcatcagcaaagcaaatcaaaacggcggcgaagataacatcacggctgtgttgattgagttttccgcagatgcaaaagagggtgaagacaagtgctaaccggcaagcggatcagcgggcgttatcatatcctccggcccattggcggcggcggaatggcaaacgtttttttagctgaggacatcattctcgaacgtgaagtcgcaattaaaattctgcggtttgactttgtgaatgacattgattttatcaggcgtttcagaagagaagcacagtcggcatcaagcctcgatcatccgaatatcgtcagtatttacgatatcggggaggaaggcgatatttattacattgtcatggaatatgtggaaggcatgacattaaaggaatacataaacgcacacggaccgcttcatccgaaagaagcgctgtccgttatggagcagatcgtctcggccatcgcccatgcccatcaaaaccatatcgtgcaccgggatattaaaccgcacaatatattgatagatcatttagggcatatcaaggtgacggatttcggcatcgccacagcgcttacgtctacgacaatcacacatacgaattctgtgctgggctcggttcattatttgtctccggagcaggcgagaggcggtctggcaacgaaaaaatcagatatttacgcgctcggcatcgtgctgtttgagcttttaacaggcaaaatcccttttgacggagaatcagccgtcagcatagcgctaaagcacctgcaaacagaaacgccttccgccagaaagtggaacccttccattccgcagagcgttgaaaacattattttaaaggcaaccgccaaagacccgtttcaccgctatgaaagcgccgaggacatggaggcggacatcagaacggcttttgacgccggcaggctgaatgaacaaaaattttccgtgcaggatgatgaggaaatgacaaaagccattcccgttattactgacggcccaaaagccgcgtctcaggcggaaacgccgggggagacggatgataaggaacagcagccagccaaaaagaaaaaacggaaatggccgtgggttttgctggccgtctgtttcatttttattatggcggctgttcttgcggtcaccgtgttcccgtctttatttatgcctaaagatgtaagcgtccccgacgtacggggcatgaagtacgaaaaagcggaagccctgcttgaaaagaacgggctccgggctgatcctgatataacggatattgaagatgaaaaaatagaagaggaattaatggtcaaaacggacccaaaagcggggtctaccgttaaagaaggctcttctgtaaaactgtacaaaagcatcggaaaaccgaaaacccagctgatcgacgtgaaaggacggcagatcggcgacgcaaaaaaagcgctgaaggaaaaaggtttcaaacatgtcaatgtcaaagaagaaaacgatgacagcgaggccggcaccgtaattgatcaggacccgtcagccggcaccgatatggtcgcaagcgatgatgaagtcaatctaacggtcagcctcggcccggcggacgttacgctgagggacttaaagacttacagcaaagaagcggcttcagggtatcttgaagataacggcctgcagcttgttgaaaaacaagcccattcagatgacgtgccggaaggacaagtcatgaaacaagagccgtcagccggcactgcggttaagccgggaagtaatgttgaagtgacgttctcgctcggacctgaagaaaaaccggcgaaaacggtaaaagaaaaaatcagcattccttacgaacccgaacatgaaggggaagagcttgaagtgcaaatcgccatcgatgataaggaccacagcatctctgatacgtatgactcatttaaaataaaagagccgaccgaaaaaacaattgaactgaagattgatcagggacagaaggggtattatcaagtgatggtcgatcataaagtcgtcagctacaaaacgattgaatacccgaaagataatgactgataaggagggaccctatgcctgagggcaaaattataaaagcgttaagcggattctattatgtcttggatgaatcacaggacaagatcattcaatgcagaggccggggcattttcagaaaaaataaaataacgcccctggtcggcgattatgccgtttatcaggctgaaaatgataaagaaggctacctgctggaaatcaaagaacgaacaaatgagctcatcaggccgccgatttcaaatgtcgatcaggccgttctcgtcttttctgccgttcagccggcgttcagcacgtctttattggaccgttttctcgtccttgtggaagccaacggcattcacccgatcatctgcataaccaaaatggacttagctgcagacggggaatcgaaagaggcgatactttcttacgtgaaagactatcaggcgatcggttatgacgtatatgtgacgtcatcaaaagaaaacagcggcttaacaggcattgtgaaacacttcgaggacaaaacgacggtgtttgccggtcagtccggagtcggaaaatcttcgcttttaaatgcgatcagcccggagcttgagctgaaaacaaacgagatttccgcgcatttgggacgcggaaaacatacgacgcgccatgtggagctcattcatacatcaggcggtctggttgcggatactccggggttcagttcgcttgaatttaccggcattgaggaagaagagctgggcagcacgttccctgagatcagagaaataagcgcctcctgcaaattcagaggctgtctgcatcttaaggagccgaaatgcgcggtaaagcaagcggtggaagaaggagagattcagccgtaccgctacgagcattacaaagaatttatgcaggaaataaaagagagaaagccgaggtattaatatgattaaggttgcgccatcaattctttccgccgattttgcttcactgggcgaggaaattaaagacgtggaaaaaggaggggcggactatatccatattgatgtcatggatggccatttcgtccctaacattacaatcgggccgcttatcgttgaagccgtccgtccggtgactgatctgccgctggatgtccatcttatgattgaaaacccggaccgctacatcccggcattcgcaaaagccggtgcggacatcctttccgttcacgctgaagcgtgtccgcatcttcaccggaccattcaattgataaaagagcagggggtaaaagcgggagttgtgcttaatccgcatacgcccgtccaaatgattgaacatgtgatcgaggagcttgaccttgtgctgttaatgacggttaaccccggttttggcggacagcgcttcattcattcggttctgccgaaaatccgtcaggtcaaacagctggctgaggagaaaggcctgtctgagcttttaatcgaggtggacggaggcgttaataaagaaacagcccctttatgcgctgaagcgggcgccaatctgcttgttgccgggtctgccgtatataatcagccggatcggaaaaaagccatcgctgacatccgaaacgcatcataaacatgctgaaaaagagcccggtgaaagccgccggctcttttcgcgtctaagagagaggatagcatatgaagacaatcaatatcgttgcgggcggcccgcgggagcttattcccgatctatccgaatacacagacggagatacgacgtgggtcggagttgataaagggacggttgctcttttggaggccggaatcattccgcaggaagctttcggtgattttgacagcattacggaagaggagctcatgcagattcaaaaagcggcgccggccctccatgtgtatcaggcggaaaaagattataccgatcttgaactcgcccttgactgggctttacaaaaagaaccggaaaacattcgggtattcggtgtgacgggcggaagagccgatcactttttagggaacatccagctgctgtataaagccttacataagcataccgatgtcaagctgatcgaccggcagaatgacattcagatgttcgggcccggccgttatacaattgaagaaaaagcgcgcagacgctatatttctttcattccgtttacggaagcggcagacggcctgacactcgacggttttaaatatccccttgataattgtcatattcctctgggttccacactatgtattagtaacgaactcattcattcacgaggtactttttcgtttgcaaaaggcatattaataatggtaaggagcgcggattagaaaagcggcttctgccatatgcggaaaaaaccatgaatcctaaagtgatgaacgcagcggatacgggacttataggaggggacaaaatgaaattttataccattaaattgccgaagtttttaggaggaattgtccgggcgatgctgggctcatttagaaaagagtaagcccaagaagctgaaatcgccctctttgaacgcataaaaaacgcctgccgcataaaagggcaggcgttcatttttgcttatacacgctcaactttaccggattttaaagcccgggcagatacatacacttttttaggtttgccgtcaacgaggatgcggaccttttgaaggttggcgccccaagtacgcttagaagcgttcattgcgtgagaacggttgtttccggcttttgtttttttacctgtaataaaacatttacgtgccatttgtttccctcctaactgcgcgaaacatctttttaaacatagtgtctcagatgctttcgttatacaatactttaaataatttaccacagctaaaaaccgtttgcaactattgtttcccttactttcaagaaaaatcacttgacatgtaaaaccaatcacatttccgcgctgaaggccgctgtctgtatcttttcttttcataatgggatacatatagtagaataatgataactctatgcacctgaaggaggaacctgtgtgtccattgaaatgaagacaaaatacggacagattgatatatccaacgaagtcatcgcaatggttgccggaggcgctgccattgactgttacggaatagtggggatggcctcaaaaaaccagattaaagacggtttgtctgaaatcctccggagagagaacttcgcaaaaggcgtacatgtccgtcaggaagccgaacaaatacatatcgacatgtacattattgtcagctacggcactaaaatatccgaagtagcccacaatgttcagacgaaggtaaaatacacagtaaatcaaacaatcggacttgcagttgattctgtaaatatttatgtccaaggcgtacgagtaacgaacccgtagtgaggaggatgagtattgtctagacgaaacttagatgggagagcttttgcggcaatgattctggcgggggctgagacattgtctcaaaacgcatccgcggtggatgcgctgaacgtgtttcccgtgcctgacggcgataccggaacaaatatgaatttatcgatgtcatccggtgcaagagaggtagagcacattgactcacccgacatcggcaaagtcggcatcgccctgtcaaaaggcctgcttatgggagcgagaggaaactcaggggtgatcttgtcccaattgttcagaggtttcacaaagagcattgaaaacaaaaaccaaattgatgcccaagagtttgccgcagcactccaagcgggagtggatatggcatataaggcggttatgaaaccggttgaaggaacgattttaaccgtggccaaggatgcggctaaaaaagcggtcgcctcggccaaagaagaaaccgatattatttcagtcatggaggccgttattgaagaagcggaagcgtcgctcaaccgcacgccggatctgcttcctgttttaaaggacgtcggtgtcgttgacagcggcggaaaaggtctgctttgtgtatatgaaggctttttggctgctttaaaaggagaggccgtaccgaaaaaagcggttcttccggcactcgatgatatggtgaatgccgagcatcataaaagcgcgcagagcatgctgagtacagaagacattgaattcggattttgtacggaagtaatggtgaggctggatcaagataaacggacgttcaaggaagaggcgttcagaaacgaactgagccgtttcggcgattcattgctggtcgtggctgatgatacgctggcgaaagttcatattcatgccgaagaacctgggaacgtactcaatctcgcacagcgttacggcgatctgattaaaattaaaattgaaaacatgagggaacagcatacttcaatcatcagccaagaacatgatgaaaaaaagccggccggcgttatgaaagaagcccgcaagccttttggcatcgtgactgtggcaatgggagagggcatttctgaattgtttacgagcatcggcgcttcacacgtaatcgaaggcggccagacaatgaatccgagcacggaagatattgttgaagccgttcagtctgtcaatgcggagacggttttcattcttccgaacaattccaatattgtgatggctgccaatcaggcggcgagcgtagctgaagaaaatgtcattgtcattccggcaaaaacggtccctcaaggcatgaccgccctgcttgcgtttaaccctgaccagccggctgatgtaaatgaagccaatatgcttgaggccatccggaatgtgaaaagcggacaggtgacatattcagtcagagacacccatattgacggcaaagaaattaaaaaaggtgattttatcggcattttaaacagttcaattatcggcagcgccgaagatcggataagtgcggcgaaattgctgctggatgaaatgatcggggaagaagatgaaatcgtcaccatcctgtacggagaggacgcgccggaagaagaagctgagaaactcgctgagtatattgctagcgtctgtgaagatatcgaggttgaaatccataacggcagacagcctctgtatccatatatatttgcggcagaatagaagggcttatcaggcccttctattcttatgcctttatttacctgcggcagtgcggcagtgtgcctgcttgccaattgagaaatgttcaattagtctaaagaaaagcgctgaatgaagtgatgttaaggaggagcaaaccagcatgaagtatagaagcgtttttgatattatcggcccggtcatgatcggtccgtccagttcacataccgcaggcgccgcccggatcggcagagtggccagaagcttattcaggcgtgagccccgccggatcgttgtgtctttttacggatcatttgcagaaacgtataagggtcacggcactgatgtcgcgattatcggcggcctgcttgattttgatacatttgatgaacggattaaaacagcgattcaaattgcggaagagaagggcatatatgtagagttccgtacagaggatgccgtgcccgttcatccgaatacggcgcgtatcgtcatttctgatgatgagggagagcttgcccttaccggtatttccatcggcggcggaaaaatagaaatcacggagcttaacggctttgagctgcgactttccggaaaccacccggctattttagtcgttcacaatgataaattcggcacgattgcaggcgttgccaatgtgcttgcgaaattctccatcaacgtcggacatatggaagtggcgcgtaaggacgtcggccagcttgcgctgatgacgattgaggtcgatcagaatattgaagaagaagtgcttgacgagctttcaacacttcctaatattatacaggttactaagatagctgactaaaaagtcaggaggaaaatgacatgtttcgtaatgtaaaagaattaatagaaatcactcaagaaaaacaaattccgatttcggaagtgatgatcacccaagagatggaagtgacgcaaaaaacacgagaagaaatctttcaaggaatggagcgcaatctctccgtcatggaagcagctgttgaaaaagggctgaagggcgtcacgagtcagaccggtttaacaggcggagatgccgtgaaacttcaggcatacatccaatcgggaagaagcctttcgggcaatctgattttagacgccgtttctaaagctgtggcgacaaatgaagtcaatgcggcgatgggaacgatctgcgctacaccgaccgccggctctgccggggttgtgccgggaacgttattcgccgtaaagcataagctgaaccctacgacagaacaaatgatccgttttctgtttacagccggcgcgttcggttttgtcgtagcaaataatgcgagtatttcaggagcggcaggaggctgtcaggcggaagtcgggtcagcatcaggcatggcagcggccgcgattgtggaaatggcgggcggaacgcctcagcaatcagcggaagcaatggcgattacactgaaaaatatgctcggtctcgtatgtgacccggtcgccggattggtagaagtgccgtgtgtcaaacgaaacgcaatgggagcatccaacgcgatgatcgcggcggatatggcgctggccgggattacaagccgcattccttgcgatgaggtgattgacgcgatgtacaaaatcggccagacaatgccgacagcactgcgtgaaacgggacaaggcggtttagctgcgacaccgacgggaagagaattagagaaaaaaattttcggaggagcgctgaaatcaagtgacacaccatcagcaaactagtatagcggaaattaagggcattgggccggaaacagaaaaaacattgcacgaacttggtatctatgacatttctgatcttctgaattatttcccttaccgttatgacgactatgagctgagggatttagaagaagtaaaacatgaagaaagagtgacggtagaagggaaggttcattcagaaccttctcttacctattacggcaaaaaacgaaacaggctgacattcagggtgcttgtcggcaattatttaattaccgcggtctgctttaaccgtccctacttaaaaaagaaactgacgttaggttctgtcgtcacgatatccgggaaatgggataaacacagacagaccgtttccgtgcaggaattaaaaaacggtcctcatcaagaagataaaagcattgagcctgtttattccgttaaagaaaacgtcaccgtaaaaatgatgagacggtttattaaggaagcgctgcagcatcatttggacagtgcggccgatccgcttcctgaaaaattgagaatccgctataagctgcctgattacaaacatgccctgcagacgatgcatcagcctgaaacgagggaatcgttacagcaggcaagacgacggtttgtttatgaggaattcttattatttcagctgaaaatgcaggcgttccgtaaagcggaaagggaacagtcaaaaggcatcagccatgtgtttcctgctgaaaagctcaccgctttcacagacagcctgccgttttcgctcacgaccgcacagacgcgcgtgcttcgggaaattaccgctgatatgacatccccttaccgaatgaaccgtctgctgcaaggtgatgtcggttcagggaaaacggccgtcgccgccatcgctttgtacgctgcgattctgtcggggcatcagggggcattaatggtgccgactgaaattctggccgaacagcatgcagattctctcgtatcgttgtttgcaaatgaagatgtaaatatcgcgcttttgacgagttctgtaaaaggaaagcggcgcagggagcttttggagcggcttgctctcggagagattgatattttagtagggacccatgctttaatccaggatgaagtggaattcaaagcgctgagtcttgttattacggacgagcagcaccggttcggggtcgaacagcgcaaaaaactcaagaataaaggtcaagatccggatgtgctgtttatgacagccaccccgataccgagaacgttggccattaccgtcttcggagaaatggatgtttccgtgatagatgaaatgcccgcggggcgaaaacaaatcgaaacgtattgggtgaaacacgacatgctggagcggattttggcttttatagaaaaagagctgaagcagggaaggcaagcctatattatctgcccgctcattgaagagtcggataaactggatgtacagaatgcgattgacgtatataacatgctgtctgacgtttaccgcggtaaatggaatgtcggcctgatgcacgggaagctccattctgatgaaaaagatcaagtgatgagagaattcagcgccaatcaatgtcaggtacttgtgtcaacaaccgtcgtagaagtcggggtgaacgtgccgaatgcgacgattatggtcatctatgacgccgaccgtttcggattatctcagctccatcagctccgcggccgggtcgggcggggagaccaccaatctttctgcatcttgatggccgatccgaaatccgaaaccgggaaggaacggatgagaatcatgtcagagacaaacgacggcttcgagctgtctgaaaaggaccttgaactgcgcggccccggtgatttcttcggaaaaaaacagagcggtatgcccgagttcaaggtggcggatatggttcatgactacagagctttggaaacggcccgccaggatgcggccaatctggtgtcttcagaggctttttggaaagatgacgaataccgcatgctgcgcggtcaattactttcaagcggcgtcctagaaggggagaaattaagctgattctgtaaaattcggcggctttcaaaaaacaatcattgcattccaatctatgagattatatactactattagtacctagtcttaattgtccggatggtgtttacagatgagaagaagcaagaaagaacgccaaaaattattgcagcagacgatcaaatcgacacccttcatcacagatgaagaattagcggggaaattcggcgtcagcattcagacgatccgtttagaccgcttagagctctcaataccggagctgagggaaagaattaaaaacgtggcagaacaaacgcttgatgatgaagtgaaatcattgtctttagacgaagtgatcggtgaaatcattgatctggagcttgacggccaggccatttccatattagaagtaagacgcgaacatgtcttcagccgcaatcaaattgcgcgggggcatcatttgtttgcgcaggcgaactcactcgccgtagccgtcattgatgatgagctggcgctgaccgcaagcgcaaatatccgctttacaagacaggtgaaagaaggcgagcgcgtcgttgcgaaagccaaagtgacggcagtcgaaaaagaaaaaggcagaacggtagttgaagtcaacagctatgtgggagaagaagtcgtgttctccggcagctttgacatgtaccgttcaaaacaatcataaaggtggagcatgcatgagaatagctgtagatgcaatgggaggcgacaacgcacccaaagctgttattgacggagtaatgaagagtattgaggcatttgacgatcttcatattacgctggtcggtgacaagacaacgatagaatcacacttgccaacaacatcagaccgcatcactgtgttgcacgccgatgaagtgattgaaccgacggatgaaccggtccgcgccgtacgcagaaagaaaaactcttctatggtgctgatggcgcaggaagtggctgaaaacagagcggacgcctgcatctcagcggggaatacgggcgcactcatgacagcgggactgtttatcgtcggcagaattaaaggaatcgaccggcctgcgcttgcgccgacgcttccgaccgtttcaggcgacggtttccttcttttggacgtgggagccaatgtcgatgccaaaccggagcatctcgtccagtacggaattatgggatctgtttatgcccggcaggttctcggaatcagctcgccccgcgtcggattgttaaatgtcggcacggaagaaaagaaaggaaacgacctgacaaaaaagacgtttgaattattaaaagaaacaaacgtgaattttgtcggaaacgttgaggcgagagacttgctcgaaggcgctgctgacgtcatcgtcacagacggctttacgggcaacgtcacgttgaaaacattggaaggttcagcgttatcgattttcaaaatgctgaaagatacactgacttcaagttttgtttctaagcttgcagcgggcgtgctaaagccgaagctgatggaaatgaaactgaaaatggactattctgagtacggcggggcgagtcttttcggtttgaaagcgcccgtcattaaagcgcacggctcttctgacgcacgcgctgtttaccatgcgctgcgccaggcgagagaaatggtcagccaaaacgtggccgcatttatagaagaagaagtaaaagaagaaaaaacagatgagtagtctggaggttaccgcatcatgagtaagattgcatttttatttcccggacagggatcacaatatatcggcatgggaaaagacctgtacgaacgcgaagaagcgtcaaaacgtatttttgatgaagcggatgaaacgcttgaaacaaagctgagctcgctcatttttgaaggtgacgccgaagaattgacccttacatacaatgcgcagcctgcgctgttgacaacgagcatcgccgtattggaaaagtttaaagaatccggcatcacccctgatttcaccgccggccacagcctcggagaatattcggcgcttgttgcggcgggagcgatgacatttaaagatgccgtttacacggtaagaaaacggggagaattcatgaatgaagccgtgccggccggagaaggcgccatggcagcgattctcggaatggatgcggagtccttgaaaaaggtgacggatcaagtgacggaaaacggtcatctcgtacagcttgcaaatctgaactgccccggccagatcgtcatttccggaacggcaaaaggcgtggagctggcttcagaggaagcgaaaaacaacggagcaaaacgggcgatcccattagaagtaagcggaccgttccattctgaattaatgaagccggcagcgcaaaaactcgaggaggtgctcagcgcctgtgagttaaaaaatgcggctgttcccgtgatttcaaacgtttcggctgacgttatgacggaaaaagacgatatcaagaaaaaactgatcgaacagctgtattcgcctgttcgctttgaagaaaccattaacaaactgattgacgaaggcgtcacgacgtttgttgaaatcgggcccggaaaagtgctttcaggccttgtgaaaaaagtgaaccgccgccttaaaacaatctcggtttctgaccatgaaaccatcgaactggcgattcaaacgctgaaggaggagaatcaggatgcttaatgaaaaaacagcagtggtaacgggagcgtcccgcggaatcggtcgggcgatcgcgcttgatcttgcgaaaaacggctgtaatgtagtagtcaactactccgggaatgaagcgaaagcgaacgaagtcgtagatgagatcaaatctttgggccgaaacgcgatcgccgtaaaagccgatgtatcaaattccgaagaagtacaaaacatgatgaaagaggctgtcgctgcattttcttcaatcgacattctcgtgaacaatgcggggatcacaaaagacaatcttctgatgagaatgaaagaaaatgaatgggatgatgtcattaacattaacttaaaaggtgtattcaactgcacgaaagccgttacaagacagatgatgaaacagcgctccggccggattatcaacgtatcatcaatcgtcggcgtcagcggaaaccccggccaggcaaactatgtggcggcaaaagccggtgtaatcggcttaacgaagtcatcagccaaagagcttgcgagccgaaatattacggtcaatgccattgctccgggctttatttccacggatatgacggacaagctttctaaagaagtccaagatgaaatgctgaagcagattccgctcgcgcgtttcggtgatccttccgatatcagcagcgttgttacgttccttgcttctgaaggatcgcgttatatgacgggccaaacccttcatattgacggcggaatggtgatgtaaagatttgtttttaaaatttcatcctagtttctctagttttttaaaaacgaatcctctataatacttgaggggaggtgaattgctatggcagatacattagagcgtgtaacgaaaatcatcgtagaccgccttggcgttgatgaagctgacgtcaaacttgaagcttctttcaaggaagacttaggtgctgattccctagatgtagttgagcttgttatggaacttgaagacgagtttgatatggagatttctgacgaagatgctgaaaagattgcaacagtcggcgacgctgtgaactacatacaaaaccagcaataagctgatgctaaaagtcccgcctgacagcggggctttagccctttaatcgttcggttaccggcgtctgacgctgtacgcgctgctgattccgtttacggcggggagcgcggtgaacctgatgtgcctatggaggttactatgtcaaaacactcacattttaaagataaaaaaaagttctataaaaaaatagagcaatttaaagagttccaagaacggatttcggttcattttcaaaacgagaaacttttgtatcaagcatttacacattcatcttatgtgaatgagcatcggaaaaagccgtatgaagacaacgaaaggcttgaatttttaggtgacgctgttttggaactgacgatctcccaattcttatttgccaaatatccggccatgagtgaaggagatttgacgaagctgagagccgctatcgtatgcgagccgtcactcgtctcacttgcccacgaattgtcattcggcgatcttgttctcttgggaaaaggagaagaaatgacgggcggcagaaagcgtcctgcgcttttagcggatgtgtttgaagcgtttatcggcgcactgtatctggatcagggccttgagccggttcagcaattcctgaaagagtacgtgttccctaaaataaacgatggtgctttttctcatgtgatggatttcaaaagccagcttcaagaatttgtacagcgggacggaaaaggatcgcttgagtacaaaattctcaatgaaaaagggcctgcccacaaccgggaattcgaggcgctcgtctctcttaaaggtgaggcgctcggtatcgggaacggacgttccaaaaaagaagccgagcagcatgcggcacaggaagctcttgcaaaattgcaaaaacatcatacgaaacaataaaatccccctgtatccctagggggatttcagtatgtctgcgcctgatataagcgggtgattatgataatattgagatacttatacgataaggaggatctgggatgttcctcaaacgtttagacgttataggatttaaatcatttgcagaacggatatccgttgactttgtaaaaggcgtcacggccgttgtcggtccgaacggcagcggaaagagcaacattaccgaagccatccgctgggtgctcggcgaacaatcagcccgctcgcttcggggcggaaaaatggaagatatcatttttgcgggaagtgattcgcgcaagcggctgaaccttgccgaagtcacgttaacgcttgataatgaagatcattttctcccgatcgattatcacgaagtcagcgtgacgaggcgggtgtaccgttccggagaaagtgaatttctcatcaacaatcagcagtgccgcctgaaagacatcattgacttatttatggactccgggctcggaaaagaagcgttctccattatcagccaggggaaagtcgaagagattctcagcagcaaagcggaagaccgccgcagtatttttgaagaagcggccggcgtgctgaaatataaaacacgaaagaaaaaagcggaaaacaaactgtttgagacgcaggataacttaaacagggtggaagatattctccacgagcttgaagatcaggtcgaaccgctgaaaatccaggcatcaatcgccaaagactacttagaaaaaaagaaagagcttgagcatgtcgaaatcgcccttaccgcctttgacatcgaacaactgcatagcagatggtcgggtttaaaagaaaaggtgcagacggcaaaacaagaagaattggcggaatcatcagctctgtccgcaaaagaagcgatgatagaagagacgagagataaaatccacgcgcttgatgaatccgtcaacgaactgcagcaggtgctgctcgtgacaagtgaagagctggaaaagctggaaggccggaaagaagtgctgaaagagcgcaaaaaaaacgccgcgcaaaaccgggaacagctagaggaatccgttacacattacacgaacaaagaagccgaactgaaagcggacattgaaaaacagtctgccgtctatgataaacttcgtgcggaagtgaagcggttaaacgcccaggtgaaagaaaagcagcaggctctcagtctgcataatgaaaatgtagaagagaaaatcgaacaattaaaaagcgattactttgaattgttaaacagccaggcgtcgattcgcaacgagctgcagcttttagatgatcagatgtcccaatctgcggtccagcaggcgagactgaccgcaaacaatgaaaaataccttgaagaacgtaacgatattgcagtccgcaaagcggcgtgcgaagaggaattggccgccgttgaagaggatattcacaatcaggtcgtccgctttcgcgaagtccagacagcatatgaacagaaaaaacgccagtatgaaaagaaagaatcagcgctgtatcaggcatatcaattcgtccagcaggccagatccaaaaaagatatgcttgaaacgatgcaaggcgatttttcaggattttaccaaggcgtaaaagaagtgctgaagcagaaagagcagctcggcggcatccgcggcgccgttctcgaactgattgcgaccgaacaaaaatatgaaacggcgattgagattgcactcggcgcagcggcgcagcacgttgtcacagacgatgagcaggcggcgcggaaagcgattcaatatttaaaacagaattccttcggccgcgcgacgttcctgccgcttacagttatgaaaccgcgccagcttcaaacccgtgatgaacagacggcttcaaagcatccgtctttcctcggcacagcgagcgggcttgtcacatatgatgcggcgtatcggaatgtcattcaaaaccttctcggcaccgtgctgatcactgaagatttaaaaggcgcgaatgaactggccaagcttctcgggcaccgctaccgcatcgtcacgcttgagggcgatgtcgtcaatccaggcggatcaatgacaggcggcgcggtcaaaaagaaaaacaattctctgctcggcagaagccgcgagcttgagacggtgactgcgcggcttgccgaaatggaagaaaaaacagctctgctcgaaaaagaggtcaaagcgctgaagcaggccattcaagagcttgaacatacgctgagcggtctccgtgaagacggtgaggctttcagaacaaagcagcaggatgtaaaaggcaggctgtatgaactcgaagttgctgaaaagaacatcaatacccatctggagctttacgaccaggagaaagcatcactgacggaaagcagccgggaaaaagagacgcgcaaatcagctctggaagaacagctgagtgaggcatccggccagctgaaagagcttgaggaagagatggaaaggctgacaaaacaaaagcagaccctatcctcaacaaaagaaacgctctctcatgaactgacggaatgtaaagtggccgctgcgaaaaaagaacaggcgtgctcgagtgaggaagacaacctcaaaaggctgaaaaaagagcttgaagaaacgcagctcgctctgaaagaaacacgggaagatttaagcctcctgacctcagagatgacgtccagcacaagcggtgaggagcagcttgaagaagcagcccatcataagcttcacgataaaacgagaacgatcgaattgatcgccagccggcgcgaccagcgtgtgaagctccagcgggctcttgatacgaacgagcttgagctgaaagagatgaagcgtctgtacaagcaaaaaacggacattctgaaagatgaagaggtaaaactcggccggatggaagttgagcttgataatctcttgcagtatttacgcgaggagtacagcttatcctttgaaggggcaaaagaacaatatcagcttgaactcgagcctgaagaggcgagaaaacgggtcaaactgatcaagctttcaattgaagagctcggaacggtcaatctcggcagcatcgatgagtttgaaagagtaaacgaacggtatcagtttttaacagagcagaaaaatgacctgacggaagcgaaaaacacactgtttcaagtcattgaagaaatggattctgaaatgacgaagcgattccatgaaacgtttatccagatccgttctcaattcaacgacgtgttccgttctttattcggaggaggacgggctgaactgaagctgactgatccgaatgatcttcttaattccggggtggacattatcgcgcagcctccgggcaaaaaactgcaaaacttaaatcttttgtcagggggagaacgggcgctgactgccattgcccttttattctctattctgaaagtaaggcccgtgccgttctgcgtccttgatgaagtggaagctgcgcttgatgaagccaatgtattcaggtttgcgcaatatttaaaaaaatacagcggcgacagccagtttatcgtcatcacccacagaaaaggcaccatggaagaagcggatgtcctctacggtgttacgatgcaggaatccggcgtttcccgaatggtttcggtcaaactggaagaaacaaaagaatttattcagtaacgaggaaagaggttgaaagatgagcttttttaaaaaattaaaagagaaaatcacgaaacagacagactccgtctctgaaaaatttaaagatggtcttgaaaaaacaagaaattccttctcaaataaagtgaacgaactcgtctcccgctaccggaaagtcgacgaggatttcttcgaggagcttgaggaagtgctgattggcgctgacgtaggttttacaaccgtcatggagctgattgatgagctcaaaaaagaagtgaagctgaaaaacattcaggatcctcaggaagtgcagtccgtcatttctgaaaagcttgtcgacatttataacagcggcgacgaacagatttctgaattaaatattcaggacgggcgcctgaacgttattctgcttgtcggggtaaacggcgtcggaaaaacgacaacgatcggaaaacttgcccataagctgaagaatgaaggcaaatccgttgtgctcgctgccggagacactttcagagccggggcgattgaacagcttgaagtgtggggggagcgtacaggcgtgcctgtcattaagcaggctgccggaagcgaccctgcggcggttatttatgatgccgtacacgcggctaaagcaagaggagcggatgtgctgatttgtgatacggccggccgccttcagaataaagttaacttaatgaaagagcttgaaaaggtcaaacgcgtcattgaacgcgaagtgcctgaggccccgcatgaggttctccttgcgctggacgcgacgacaggccagaatgcgatggcgcaggcgaaagaattctccaaagcgacgaatgtgacgggtatcgcattaacgaagcttgacggcaccgcaaaaggcggtatcgtcctggcgatccgcaatgagcttcacatccctgtgaaactggtcggcctcggagaaaaggttgacgatctccagcggtttgatgcagaatcttacgtatacggtctcttttcggatttagttgaaaaagccgaagattaatgaataaaaaacgagtataaaatggacggttttatactcgtttttttatacgcattgatagatcggaatggaggggcagttgttggacaaatggctgaaagctgaattggaaagtaagatcggcgcgataaaccatatgtcgctgctggatgaacagggaggcacttcaaccgttcgaaaaatagtgaccggtcaagacgcatttttgctgaaaagttcttttcaacagaagtatcgggaatggttaatgagagaagccttcgttttacaacaactgacggaaactcgtcgtctgcctgttcctatttactatgggatgatacaggaacagcatgccagccatatcatcatgtcatttgaggatggaatcaccctgacttcggctttaagaaaagccaaaggggatactgaaaagaaaaagctgatcaaaagtttcggccagtttctgcagcggctgcatgaaaccgaaatggtctctggtttacagccggaaacagactggctcgatctgcaaatcaaacgagccggggaatatgtcaaaaaaggacaagctgaaggaagtgcagagcttttgaaggaattggacaggtacaggcctgttcctgttcagcagacaatgattcacggtgactgcacgactgataatgtgctggtgagagacggagaggtctatctgtttatcgatgctgcgggaatatcggcgggagatccgcgttatgatgaatcattagcgatcagtcgttttgtcacaaatgaatcatgtctcaatgctttttacgaaggctattgccgctatcgtgtatcaaaacaagaattcgagtattttaacgacggtctgtatgaatttttttgaaaacacttattatgtaaaaagagcatcctgctttgacaagataaaaacttgacacacgctctgaaaccatgtaaactaagtttttgtaaagggatttgacttaacaaaggggagagctcaaatgtcgctcgaaaaaacgacgagaatgaactatttgtttgacttctatcagtcgttgctgacgtcaaaacaaaagagctatatgtcgctttattatctggacgatttctcccttggtgaaatagccgaagagtatgacgtttcaaggcaagccgtttacgataacatcaaacggactgaagcgatgcttgaacaatatgaagaaaaactgctcctttttaaaaagtttcaggagcgtaaagaaatgtttacaaagctgaaagagcttgcttccggcttgcaggaagaggaaaaaatgacggctctgattgaagcgcttgagaaattagattaggaggcggcaaacaatggcatttgaaggattagccgaccgactgcaaaagacgatttcaaaaatccgcggaaaaggaaaagtcagcgaacaagacgtaaaagagatgatgcgtgaagtccgtcttgcgcttcttgaggctgacgttaactttaaagtcgtaaaggattttgtgaaaaaagtaagtgaacgggctgtcgggcaggacgtcatgcagagtctgacacccggtcagcaggttattaaagtcgtaaaagaagagcttaccgagctgatgggcggcgaagaaagcaaaattgccgccgccaaacgcccgccgaccgttattatgatggtcgggctccaaggtgccggtaaaacgacaaccacggggaagcttgccaacctgctgcgcaaaaaacataaccgcaaaccgctgctcgtggctgcggatatttaccgccccgccgcgattaaacagctggaaacactggggaaacagcttgatatgccggtcttttcgcttggcgatcaggtcagcccggtggaaattgccagacaggcgattgaaaaagcgaaggaagagcatcatgattatgtgattttagataccgccggacggctgcacatcgatcatgaactgatggatgagctctccggcgtaaaggaagtcgcaaatcctgaggaaattttccttgtcgtcgactcaatgaccggtcaggatgcggtaaacgtcgccaaaagctttaatgaccagctcggtttaacgggcgtcattttaacaaagcttgacggggatacccgcggaggtgcggcgctttctatccgcgcggtcaccgaaacgccgattaaattcgccggaatgggagaaaagctcgatgctcttgaagcgttccatcctgaacggatggcatcccggattctcggaatgggtgacgtgctgacgctgattgaaaaagctcaggcgaccgttgatgaagacaaagccaaagagcttgagcagaaaatgagaacgatgagcttcacattggatgattttctggagcagctcggccaggtccgaaacatggggcctcttgacgaactgctgcaaatgatgcccggagcaggcaaaatgaaaggcttaaaaaacatccaagtcgatgaaaaacagctgaatcatgtggaagcgatcattaaatcaatgactgttcttgaaaaagaacagccggatattattaacgccagccggcggaagcggattgccaaaggaagcggaacatccgttcaggaagtcaaccgtcttttaaagcagtttgaggaaatgaaaaaaatgatgaagcagatgaccaacatgtcaaaagggaagaaaaaaggctttaaattaccttttatgtaatcggttatacatgataaaaccgttgttaagaaaaaacactttacaaacacttttatcattgttaatatactatcttgttgaaatattttcggaggtgctagtaaaatggcagtaaaaattcgtttaaaacgtatgggagcaaaaaaatctcctttctatcgtattgttgtagcagattctcgttcaccgcgtgacggccgtttcatcgaaacagtcggcacatacaacccggttgcaaagccggctgaagtgaaaatcaatgaagagcttgctcttaaatggcttcaaacaggagctaaaccttctgatacagtccgcaacttgttctcaagccaaggaattatggaaaaattccacaacgctaaacaaggcaagtaatgactgatcagaacttggaagatttgattgtcagcattgtggctccgcttgtcgaccatccggaagacataacggtcacaaaggaagagactgatcaaaagattgcgctacgcttatctgtcaataagtcggataccggtaagattatcggaaagcaaggccggactgcaagagcgattcgaaccgtcgtttttgcagctggcgcacagtcttctaagaaagttcaatttgaaatatttgactgaaaaagggagagggccggcacctcccctttttttacacgtaaaaaaggcaaatgaacagaaatatgttggaagagtggggagtctggtcctatgcagattattcacagggtaaccgttatgcaggttctgaccgagcaaagcaaggaaaagcttttggcctcttttgcagaaaaaaagcaaacgcttgaacgagaatgcagccagctctattttcagcttagaaaacatgaaaaagatcagcagaatcccgatgtagcggaatcttttaaaaaagccattgaaaaaagacaagataaaatcaaaatgattgatttccaaataagccagacagagtcgctcccgcttggaagcgaagtgaaggaaaaggagatcgatgcgctgctttcaatcaacgtcggtgataactggcatgaaaaaacagcggcaaataccatcgtcataaaagacggggtagtaattgaaatccgcccgaggtgataatatgacaaacagatggtttaatgtaggcaaaattgtaaatacccacggcattaaaggcgaagtgcgggtcatttctaaaacggactttgccgaagaacggtacaagcccggcaatacgctctatttgtttgcggaaggggctgcggagccaatcaaagtaacggtcagcgcccacaggcttcacaagcagtttcacctgctgcaattcaaagaaatgccgagtctcaatgaagtcgaacacctaagaaacatggtgatcaaagttcctgaagaagacttgggagagcttgaagaagatgaattttattttcatgaaatcatcggctgcgaggttgtgtcagaagacggggaactgatcggcacagtgaaggaaatcttgacgcccggggctaatgacgtatgggtggttgcaagaaaaggcaaaaaagatgcgctcattccgtatatagcttctgtggtgaaggatattaatataaatgagaagaaaattaagattcatgtaatggaagggttaatagacgaatgaaaatcgactttttaacactgtttcccgaaatgtttcaaggggtgctcggctcatccattctgcaaaaagcacaggaaaaagaggctgtccgttttgacgtcatcaatttccgggctttttcggataataaacaccaaacggttgatgattacccgtacggcgggggagccgggatggtgttaaagccgcagcccgtatttgatgcggttgaaaagctgacagccggtacggacgccaagccgcgcattattctcgtctgcccgcaaggtgagcgttatacgcagaagaaagccgaggagctggcggaagaggaacatctcatgtttatttgcgggcattatgaagggtatgatgaacggatccgggaacatcttgtcactgatgaaatctccatcggggattttgtgctgaccgggggagagctccctgccatgatgattgccgacagcgttgtcaggcttttgccgggcgtcctcggaaaagaagcatcccacgtggaggattccttcagcacggggcttttagagcatcctcactatacgaggccagccgattataaaggcttaaaagtgcctgagacccttttgtccggcaaccatgccaaaatacaagaatggcgcaataaagaatcaatcagaagaacctttttaagacgtccggatcttcttgaaaactatcctctcactgatgagcaaagaaaatggatttccgagtgggaaaacgaatagattctattgcgcaggtgatgaagatatgataagatactacttgtggcttaaggaggcttatccttcagaagcttgaaaacgatgttccgctgtgccttgcagttgtggccaagagcatctgttggaaggagttgaaaacgatgcaaaaactaattcaagatatcacaaaagaacagcttcgcactgatcttcctgcgttccgtcctggtgacactttacgtgtacacgtaaaagttgttgagggtaaccgtgagcgtatccagatcttcgaaggtgttgtgatcaagcgtcgtggtggtggaatcagcgaaacgttcacagttcgtaagatttcttacggtgttggcgttgaacgtacattccctgtacacacaccaaaaatcgcgaaaatcgaagttgtacgttacggtaaagtacgtcgcgctaagctttactacctgcgtgaacttcgcggaaaagcggctcgtattaaagaaatcagacgataatgataacgaacgaaaagagcttgttacccgtaacaggctctttttttatatgaaatttgtaaaagcggaacaagcaacgtaaaatacataagagatcatcggaacatccggttccggtaaataaggcaggtgtcgaagtcacatgaccattcaatggttcccgggccatatggctaaagcgagacgggaagtaacagaaaaactgaaattaattgatatcgtatacgaattggtggatgcgagaatcccgatgtcatcgagaaatccgatgattgaggagattttaaaaaataagccgcgcattatgcttttaaataaagccgataaggcggatgcggctgtgactgcccagtggaaggaccactttcaggaacagggcattccctctctttcaataaactccgttaacgggcagggactgcatcaaatcgtgccgtcctcgaaagagctgctgaaggataagttcgataaaatgaaagcaaaaggtgttaggccgagagcaatccgcgcattaatcatcggcattccgaatgtcggcaagtctacgctcattaaccggctggccaaaaaaaacattgccaagacgggagacaggcccggcattaccacttcacagcagtgggtaaaggtaggcaaggaattagagctgctcgatacaccgggaattttatggcctaaatttgaagatgagcttgtcggcttgcgcctggcgatcaccggggcgattaaagatacgattatcaacctgcaggatgtggctgttttcgggctgcgctttctggaagagcattatcccgaccgtttgaaggagcgctacggacttcaggaaatccctgaggatatcgccgctcttttcgacgcgatcggtgaaaaacgcggctgtttgatgggcggcggaatggttgactatgataaaacaacggaagttatcattcgggacatccggacggaaaaattcggcaggctttcatttgaagcaccatcagaataaagacgcgcagcgatgcgggtctttattttttccgcagaataccgatatacataatgtaagggagaagagaacgtgaatacattaaccgtaaaaagcgtaaaagaacgcctgcaagagatcagggacgaaagcgaccccttccttgcccaatgtgagaaagacccgagaaaaagcgtacagacgcttttagagcaatggctgaaaaagcatgcgaaggaaaaagctcttaaagagcaatggctggacatgacggcatacgaaagactgtcatccaaaaagggcttccgcctgattgcgggtgttgacgaagccggaagagggccgcttgccggaccggttgtcgccggcgccgtcattttgccggcagaatgcgagattctcggtctcacggactcgaagaaattgtcggaaaagaagctcgaggagtattacagccggatcacggaagaagcggcggctgtaggagtcggcattgtccatgcggacgtcattgaccggatcaacatttatgaggccgcgagactggcgatggtaaaagccgtcaatgctttaacggaaacacctgattatctgcttgttgatgccatgacccttccgcttgacattccgcagtcatcagttataaaaggggatgccaaaagcgtgtcaattgccgccggagcctgcatagcaaaagtaacgcgggaccgtctcatggctgagtacgccaaaacttaccccatgtacggctttgaaaaaaataaaggctacggaacgaaagaacatcttgaagctcttcaggcatacggaccgacaactattcaccgaaaaacgttcgctcccgttcaatcttattgttagaaaagaggcttaagacatgaacattagcggcgaaatccaagcggctttcagacagctgacggcggaaatccctccggaccggcaggacggcggtaaagacagcggtactcaaaggctgctgttagggaaggttctccgtttgctggacgatcaaagcgctcttatccagatcggcggccggacgatgcagggaaaacttgaaaccgcccttcgtccgcaggcgtattactggttttcttatgacaaacagccggcggaaaaaacgggccggcttcatgtcatcgaccaattcgaaggaagcccgaaaaccgttcaggaagcggcgggtagactgttaaacgctctttccgtcaaaccgggccctgtgtctctgcatattgccgaaacgtttatgcagcagaagctgccgatgacggaaaacagcctcaaagcctgcgtccgctgggctgaatcgcttccggccgccgaattgaaaaaagcggcggaaacaatcgtatttgcgctgaaacgggaactgcccgcacatccggaagtcttgtcagccattcatgccgttaaatatccggttccgacccggcgcctcctctcaggactgcttcaggcaatcaatcaggcaccgcaatcggcaaaagagctgtctgtgctcaaagaggcggtttctgacgtattaaacgcggaaacggatcttcatgcagaacgtctcttgaagaagcttgccgaggctgcacgcatgccgatcccagaaaccgggctgatggatgaagaagaacggacggaatcaaaacaatcaccatttgtccgagagactcgtgaaaacggaaaggcagtctcaagccaaccttctcctccgagtgcgcggacagatcaaaaacttcctgaaaaaacggcaaaacagattatagagaaattaatgacatcggcagaaaaaactgaaaaccgccccgtaaaagtaacggcggagatcattaaggctttcatttctcaagaaaaaacatttaaaacagcacctgttcttcaaaaagcacatctgacagaacaggaggcggctgttttcgaaaaagccgttcagctcaccgaattgaaatatgcggaaaaacatgatgtattaagccttttgcagaaaatcaaaaaaggattgggcacgcgtgatgaattatcattcattacagcgcttgaaaaaggcgtatctccgcagccggagaaacaagcgctgaaaacggccctccaagccgtccggacgcttcaagaagcgccccaatccgttaaacaagaggcggaaccgcttattcataaattaaacggccagctgtttattgagcagcataacccttcttttacgcagatggtgctgtcatttccgctgggagcgtccgcgtatgagaatgacatcacagttctctttaaaggacggaagaagccggacggaaaactcgatccgtcacattgcaggctcctgtttttgctgcatcttgaaacactgcaagaaaccgttgtggactgcgtgattcagcaaaatgtaatgaccattacggttgagactgattttgagcttcaggcggccatcgaccctctcgtaccggctttaaaagaagccgtaaaagaaacgggcttcagcctgtcaggcgtcacgtctaaaaaacggcgcccgaaagaccagagcgctcttgtggaagagtttatagaaaaagacggcggaagaaaagtggatgtgaaaatatgaaagagcaaacgccgttaagaagagctgtcgccctgcattacgaccggcagaaagaccaagccccgaaggttgtcgcaacaggcagggggcacgtggcggaaaatattataaaagaagctgagaaggctggggtccccattcaggaagacagaacccttgtcgaattaatgcgccatttgacggttgacgatcacataccggaggcgctctatgaaaccgttgccgaaattttttcatttgtttacagactggacaaaaccctgaaaaacgaaaaataaggaccattcatttcccggactccgtttaaatttatattttcaataaaataaaagttagaatgtttggaaggatataaagattttgttttgaaccctagacaattcttccagtattatatagaatgaaagcgcagtctatttttagttttgctacataagttaggaggatgggaaatgaatatccatgagtaccagggaaaagaagtcctcagaaaatacggggtgtctgttcctgaaggtaaagtggcttttacagcagaggaagcagttgaaaaagcagagagcctgtcaagctcggtttatgtcgtaaaggcgcaaatccatgctggcggccgcggcaaagctggtggggtaaagattgcaaaaacaaaagatgaagtgaaagagtatgccgaagaactgttaggcaagacgctcgtcacacatcaaacgggtccggacggacaagtaataaaacgcttacttattgaagaaggctgcgatattaaaaaggaatactatgtcgggcttgtacttgaccgcgctacttcaagaatcgttttaatggcgtctgaagaaggcggaacggagattgaagaagtagcggaaaaaacacctgaaaaaattaaaaaagcggtaattgatccggctgtcggccttcagggctatcaggcaagggaaattgcattcgcaattaacatcccgaaagagcttgtcggcaaagccgctaaatttatgctcggtttatataaagcatttgttgagaaggactgctccatcgccgagatcaaccctctcgtcgttacgggggacggaaacgtcatggcgctggatgctaagctgaacttcgacagcaatgcgttatacagacaaaaagacattatggaatacagagatttagatgaagaagatccgaaagaaatcgaagcgtcaaaatacgatttaagctacatttcccttgatggaaatatcggctgtatggtaaacggcgcgggtcttgcaatgtctacaatggatatcattaaacactacggcggagaacctgcaaacttccttgatgtcgggggcggcgcaaccgcagaaaaagtgacggaagcttttaaaatcattctttccgatcaaaacgtaaaaggaattttcgttaatattttcggaggcatcatgaagtgtgatgtcatcgccgagggcgttgttgaagcgacgagacaagtcggattgacattgccgctggtcgtgcgccttgaagggacaaacgtagatttaggaaagaaaatcctgaatgaatcaggcttaaacatcacatctgcggaatcaatggcagacggcgcacagaaaatcgtatccttagtttaggaaagaatgaaaggcaggggaccagataatgagtgtttttatcaataaagatacaagagttattgtacaggggattacaggttctaccgctttatttcatacaaagcagatgctggaatacggcacgaatatcgttggcggtgtaacacctggaaaaggcggaacggaagcggaaggcgtaccggtattcaatacggtcgcagaagcggttcatacaacgggcgctgatgcgtcagtcatttacgtgccggctccgtttgcggcggacgcaattatggaagcggttgacgcggaaattgatcttgtcatttgtatcactgagcacattccggttttggacatggtgaaagtgaagcgctttatggaaggcaagaaaacgagattaatagggccgaactgcccgggtgttattacacctgaagaatgcaagatcggcattatgccgggatacattcataaaaagggtcatgtaggcgttgtatcccgttcaggaacattgacatacgaggccgtccatcagctttcagaagccggcgtaggccagtctaccgctgtaggaatcggcggcgatccggtcaacggcacgaactttattgacgtgttaaaagcgttcaatgaagatcctgaaacacatgccgtcatcatgatcggagaaatcggcggcacagctgaagaagaagcggctgagtgggtgaaagcgaacatgacgaagcctgttgtcggctttatcggcggtaaaaccgcgcctccgggaaaacgcatgggccatgcgggcgccatcatctccggaggaaaaggcacggcagaagaaaaagtcaaaacgatgaacgcctgcggaattgaagtcgcggaaaccccttctgtaatgggtgaaacgctgattaaggtgttaaaagaaaaaggcttatttgaaacgtgcaaaacgcactgatcgaagcaggggcagccgtaacggctgttcctgtttttgctgaaaaaagaggaggttgccagatttggatcaagcatcgcgctgtttaatggtctgcagtattaatcaaatcatttccccgtctcttctattaaaatggtggaaagctgatcactctctgtcttttttttcggatccgcatccattaactgttttatcagaggggaaaacagccccggaagcaatttttcgggaaatagagcgcaaggatccggaacttgatgaagttctgtccgattaccgccgcgaaggcattactgttattccgatttcatcaagctgctacccaacatggcttaaagcgatttatgatccgccggctgtcttgtatgcaaaagggaacacaccgcttcttgaaaaaggcagaaaaatcgggattgtaggaacgcggaaaccgacggaagacggaataaaagcggctgggcatctttccgccgaactctcaaaaaaaggctgggtcattgtaagcgggcttgcatccggtatagacggtttgtctcataaggcgagcatcagggcaaaagggcttacgatcggcgtgatagccggcggattccatcacatctatccccgggaaaatctcctgttagcagaatacatggctgaacaccatctcctactctcagaacatcctcctgaaacaaagccgaaaaaatggcactttccgatgagaaaccgcataatcagcggactaagtgaaggaattgtggtcgtgcagggaaaagaaaaaagcggttcattaatcacagcttaccaggccctcgatcaaggcagagaggtatttgccgttccgggttccatatttaatccatattccggaggacctataaaactcattcaagaaggggcgaaagctgtattatgcgcagaggatattgacggagagctgaccgcccgatgcgttcagtatacggaacccttttgaaatatcgtttgacaaacggtattgtaatatttaataatagtgaggatttaaagttgcatattattttcatgtataaaatgacgttcatcataaagaatgaaatgttgaaagccataaaaaggcagctctaaaatgaattgatacttgaaaagagagagaacacctcttgagggggatgaaaatgtctgattatctagtcatcgtggaatcgccggcaaaggcgaaaacgattgaacgttatttagggaagaaatataaagtcaaagcttcaatgggacatgtccgggatcttccgaaaagtcaaatgggagttgacatcgaacagaactttgaaccgaaatatattacgatccgcggaaaaggccctgttttaaaagaattaaaaacagcggcaaagaaagcaaaaaaagtctatctcgcggccgaccccgacagagaaggagaagcgattgcatggcatctcgcacacagccttgatctggatctcagctcggactgccgggtcgtctttaatgaaataacgaaagacgccattaaagaatcatttaaacatccgcgcatgattaacatggatcttgtcgatgcgcagcaggcgcgccgcatactagacagactcgtcggatacaaaatcagcccgattctttggaaaaaagtaaaaaaaggcctcagtgcgggccgtgttcaatccgttgcgctccggctgatcatcgaccgggaaaaggaaatcaatgactttaaacctgaagagtactggacgattaccggctcatttttaaagggaaaagagacgtttgaagccggatttttcgggaaaaacggcaaaaagcttcctttaaaaagcgaagaagacgtaaaagccgtccttgctcagctgaaaggcaataagtatacagttgacaaggtgacgaaaaaagagcgcaaacgaaatcccgctctgccgtttacaacgtcaactctgcagcaggaggctgccaggaagctgaatttcagagcgaagaaaacgatgatgatcgctcagcaattatatgaaggaattgatctcggcaaagaagggacagtcggactcatcacgtatatgagaacggactcaacgcggatttccaatacagccgttgaagaggcgtcagcttttattgatcaggcatacggaaaagagtacttagcgggaaaacggaaaccggcaaagaaaaatgaaaacgctcaagatgcccacgaagcgatccgcccgacttcggtgctcagaaaacctgccgacttaaaagcggtgcttggaagagaccagctcagactatacaagctgatttgggagcgttttgttgcaagccagatggcgcctgccgtacttgatacgatgagcgtcgatctcagcaataacggattgacattccgggcaaacggaagtaaagtcaaattcgccggcttcatgaaagtctatgtagagggtaaagacgatcagctggaagaaaaagaccgcatgcttccggaccttaaagagggagacacggttttatcaaaagatattgagcctgagcagcactttactcagccgcctccgcgttacacagaggcgcgcctggttaaaacgcttgaagaactggggatcggccgtccttcgacatatgcgccgactcttgacaccatccagcgccgcggttacgtgggattagacaataaacggtttgtgccgactgagcttgggcagatcgtgctggatcttatcatggagtttttcccggaaatcatcaacgttgaattcacggctaaaatggaaagggaccttgaccatgttgaagatggcgagacagaatgggttcaaatcattgacagcttctataccgatttcgaaaaacgcgtgaaaaaagcggaagctgaaatgaaagaagtggaaattgaacctgaatacgcagatgaagattgtgaattatgcggctcccggatggtttataaaatgggccgatacggtaaatttatggcgtgttccaacttccctgactgccggaatacaaaaccgattgttaaacaaatcggcgtaaaatgtcctaagtgccatgaaggaaatattgtcgaacgaaaatcaaaaaagaaacgcgtcttttacggctgtgaccgttatcctgaatgcgacttcgtatcttgggacaaaccgattgaacgaaaatgcccgaaatgtgaaaatatgctcgtagagaaaaagcttaaaaaaggcatacaagtccaatgcgtcgaatgcgattataaggaagaaccacagaagtagcggtgagcagagccttgctcaccttctttgtgtggaagggacaaacaacaggagatgaaaagaaatgaaccagcaaacagttaatgtaatcggagcaggccttgccggaagtgaagcggcatggcagcttgcaaaacgaggaattcaagtaaaactatacgaaatgcggcccgtcaggcagacggcagcccatcatactgataaattcgctgaactggtatgcagcaactccctccgttcaaatacactcgccaatgcggtaggcgtattaaaagaagaaatgcgggcgcttgactcagcaatcattcaatctgctgataaatgctcggttccggcagggggagcgcttgccgttgaccgccatgaatttgcgcaaagcgtgacggatctcgtgaaaaaccatccgaacgtaacggttcttactgaggaagtaacagagattccggaaggcccgacggttatcgcgaccggaccgcttacatcagaatcgctttcacagcagctgaaagagctcacgggagaagagtatctgtatttttatgacgcggcggcgccgattgtcgaaaaagacagccttgatatggataaagtgtacttaaaatcccgttatgacaagggagaagcggcatacttaaactgcccgatgacagaggaagagtttgaccgtttctatgaagcattgacgacggctgagacggttcctttaaaagaattcgagaaagaaatcttctttgaaggctgcatgccgattgaagtcatggcgaaaagaggcaagaaaacgatgctgttcggaccgatgaaaccggtcggactggaagatccgaaaacaggcaagcgcccttatgcagtcgttcagctcagacaggatgacgcggcgggaacgctttataatattgtaggttttcagacacatttaaaatggggagatcaaaaagaagtgctgaaactgatccccggccttgaaaatgttgatatcgtcagatacggcgtcatgcacagaaacacatttatcaactcgccgagccttttgaacccgacatatcaatttaaacagcggaacgatctgtttttcgcgggccaaatgaccggtgtagagggttatgttgaatctgccgcttcaggtcttgtagcgggaatcaatgccgccaaacttgtgctcggtcaggatcttgtgacattcccgcaggagacggcgatcggaagcatggctcactacattacgacgacaaatcagaagaacttccagccgatgaatgcaaacttcggcctcttaaaagaattgcctgtaaaaattaaaaacaaaaaagaacgaaatgaagaatacgctaaacgcgcaattgagactattcaaactatttcgaaaacgatatagcttttcattgcaacttcgatgcattatatgataccatttaaaagcccttcggagagggaggtcttcataatgactgagaatgttaacttttttttaaagttattcgttgaatatttacaaattgaaaaaaattattcacaatatactattgtgaattatgttaattcgattgaagaatttgggatgtttctgcatgctcaaaatataaatggaatgaaagaagctgcatatcatgatgtgagaatatttttgacagaggcttatgaaaaaggcctgtcaagaagaacaatcagcaagaaaatttcagctttgagaagcttctataaatttttaatgagggaaaagcttgttgaagagaatccgtttcagcttgttcatctgccgaaacaagagaaacggattccgaagtttctttatgaaaaagaacttgaggaactattcgctgtctcagacagaagtcagccgtcagggatgcgcgatcaggccctgcttgagcttctttatgcgaccggaatgagggtcagtgagtgctgtacgctcactgtcggcgatcttgacctgttcatggatacggtgctcgttcacgggaaaggcaagaagcagcgctatatcccgttcggctcatatgcccgtgatgcgctggagctgtatatcaacagcggaaggcagtgcctgcttgaaaaagcaaaagagcctcatgatgtgctgtttgtcaatcaaagaggcggcccgctgaccgccagaggaatccggtatattttaagcgggcttgtaaaaaaagcatccggcactttacatatacacccgcatatgcttcggcacacgtttgcgactcatctgctgaatgaaggggctgatttaagaagcgtccaggagcttttgggccattccaatctgtcttctacgcagatatacacgcatgtatcgaaggaaatgctgagaaacacatatatgtcccaccacccgagagcttttaaagaaaattaaaaggaggcccttctcatgtcatcttttcatgcgacaacgatttttgccgtccagcataacgggaaaagcgctatgtcaggagacggccaggtcacattcggtcaggctgtagtcatgaaacataccgcgagaaaagtgagaaagctgtttaacggaaaggttctggccggatttgcgggatctgttgcagacgctttcacactttttgaaatgtttgaggcgaagcttgaagaatacaacggcaatttaaaacgtgcgtcggttgagcttgcgaaagaatggcgcagcgataaagtgctgcgcaagctggaagccatgctgattgtcatgaaccaggataccttgcttctcgtatcgggaacaggtgaagtgattgagccggatgacggaattttggcaatcggctccggcggaaactacgccctgtcagcaggaagagcgctgaaaacctatgccggagagaatctgtccgccaaagatattgcaaaagccgctttgaaaatcgcaggcgagatttgtgtgtacacaaacgatcagatcattttggaagaacttgaatagaaaggacttgaggcgcatggaaaacaaaccgttaacaccgagacaaatcgtagatcggttggatcaatacattgtaggacagcaggatgcgaaaaaagctgtcgccgtggcattaagaaaccgctatcgcagaagtcttcttgatgaaaaactgagagacgagatcgttcccaaaaacatcctgatgatgggcccgaccggggtggggaaaacagagatcgccagacggatcgccaagcttaccggtgcgccatttataaaaattgaagcgacaaaatttacagaagtcggctatgtaggcagagatgtcgaatcaatggtcagagacctcgttgagacatccgtgcggctcattaaagaagaaaaaatcagcgaagtgaaagaacaggctgaagaaaatgcaaacaaacgtatcgtgcggcttctcgttccgggaaagaaaaaacaagcgggtgtgaaaaatccgtttgaaatgcttttcggaggaagtcagacggcaaatgatgatgaagccgatcagcaggaagaagcaagccttgaagaaaaaagaaaacgcatggcgcatcagctcgcattgggagagctcgaagaccattacgtctccgtagaggtggaagagcagcagccgtcgatgtttgacatgctgcaaggctccgggatggagcagatgggcatgaatatgcaggatgcgctgagcaatctgatgccaaaaaagaaaaaacgccgcaaaatgacggtcagagaagcaaggaaggttctgaccaatgaagaggcaggcaaattaatcgatatggatgaagtcggccaagaggccgtgttaagagctgaagagggcggcattatctttattgacgaaatagataaaattgcaaaaaacggaggggcttcttcctcagcagatgtatcgagagaaggcgttcaaagagatatccttccgattgtcgaaggatctaccgtcgtcacgaaatacggctccgtcaaaacagatcacgtgctgtttatcgcagccggggcattccatatggccaaaccgtctgatctgattccggagctgcagggccgctttccgattcgtgtagaattgagcaagctgacggtggatgattttgtgaagattctcgtcgaacccgataacgcgctgttaaaacaatatcaggctttattgcagacagaaggtatatctcttgaattttctgacgaagctattcgtaagatcgccgaagtggcttatcatgtgaatcaggatacggacaacatcggagcgagaaggcttcacacgatattggaacgtctcttggaagacctgtcgtttgaagcgccggacgtgacgatggaaaaagtcgccatcacgccgcaatatgttgaagaaaagctcggaacgattgcaaacaacaaagatctaagtcaatttatattgtgaaaatttaataagaggaattctaggaggattatttatcatggctttactacaaaaaacacgaattattaacagcatgctgcaggctgcggcaggcaaacccgtaaactttaaagaaatggctgaaacgcttcgtgacgtcattgattctaatattttcgtcgtcagccgcagaggaaagcttttgggctactctattaatcagcagattgaaaatgaccgcatgaaaaaaatgcttgaagaccgccagttcccggaagagtacacgagaaatctgttcaatgttccggagacgtcttcaaaccttgatatcaacagcgaatacacggcatttcctgtggaaaacagagacctgttccaagcgggcttaacaacgatcgtgccgatcatcggcggaggagagagactgggcacgctgattctgtcccgtctgcaggatcaatttgaagatgatgatctcattcttgctgaatacggagcaaccgttgtaggaatggagattttaagagaaaaagcggaagaaatcgaagaagaggcgcgaagcaaagcggttgttcaaatggcgatcagttctctgtcttacagtgaacttgaagcgattgagcatatctttgaagagcttgacggaaacgaaggcttgctcgtggcaagtaagattgcagaccgtgtcggcattacgcgttcagtaatcgttaacgcgctgagaaagctggaaagcgcaggcgtcattgaatccagatctctgggtatgaaggggacgtacattaaagttctgaacaacaaattccttattgaattggaaaaccttaaatctcattaagacaaaagcaggatccctgaaaatgggggtcctgctttttttatggacaataggtgaaaagttgcagtttaaagttgcttattggaagctgatctgagataatccatcttgctgtgtgaaaaaaggaggaagatacagaaattctgctattttcagtcttatattaaacaaatacttgtagtccaaatactctaggacttaatacctacatgcaaaatagatataattgagcacttttttttagcctaacttcatagactttaagcctgttatttcttacaataagcatatggttttacaattctcgacaaggatttttaggagaaaaatatctgaaatggaggtaagtggatttggacttattttctggaactatacaaaatcttgagaatgccttggggagagcggacattaagcaaaaagtcttaactaataacatcgccaatatagatacaccgaactataaggcaaaaaaagtctctttccgaaatttgttagatcaggaaacatccaatcttgaggcggtaaaaaccgactatcggcacgttgactttacgggttcaagggacgattattctatcgtgtccagcagtgatacatcgtaccagcaaaacggaaacaatgtcgatatcgacaaagaaatgacagatttagccgaaaaccaaattaattatcaggctttggttgaaagaatgagcggcaaattcaattctctgaaaaccgtcttgacaggaggaaaataatgagtggctttcaaagcttaaatatttcgggttccgctttaactgcacagcgtgtccggatggacgtcgtatcgtccaacctggccaatatggacacaacgagagcgaagcaggtaaatggcgaatgggtgccttacagaagaaagctggtatctctccaatccggaggcgaatcattttcgtcccttttacattccaagatgaacggaacaggaagcgcgggaaatggcgtaaaggtatctggcgttacggaagacccgtccgcttttaatctcgtttatgatccggagaatcctgatgcgaataaagacggatatgtacaaaaaccaaatgtagacccattaaaagaaatggtggatcttgtcagcagcacgagatcatatgaagcaaacgtaactgcattaaacgcctccaaaggcatgcttttaaaggctttagaaatcggaaagtaaggtgatgtaagtggttaacgctattactccttttcagcttcaacaaacccaaaacactcaaaacgtaacgaatcaattaaaccaaactcaaaaaactgattcttcaaaccaaacaagcttttcggagcttttaaaaaactctattgattcgttaaatgagtcacaagtaaaatctgaccaaataacgaacgaactggctgcaggaaaggatgtaaaccttgacgaggtcatgatcgctgcccaaaaagcaaatatttctctgacggccgctaccgaattccgcaataaagccgtggaagcctatcaggaaatcatgagaatgcagatgtagtggtcagattgaagagaatgactggaatgaccgggggttaacatgaatcgtactctaatgcaaatgaaaaccaaaacggcagcgttttggaacaacagatcaaaaacacagaagatactcatggtaagcggcttggccgcattcattattttactcatcgtcgttattatttttacttcgtctgaaaagatggtgcctctttataaagatttgtccgcggaagaagcggggaagattaaagaagagctcgatacgaaaaaggtgtcttctgaacttgctgacggcggcacggtcataaaggttcctgagagccaagtggattcgcttaaagtccagcttgccgcggaaggcctgccgaaaacgggatcaattgattattcgtttttcggacaaaatgcgggcttcggcctgacagataatgagtttgacgttttaaaggttgaggcgactcagaccgaattgtcaaacctgataaatgaaatggacggtattaaaagctcgaaggtcatgatcaatatgccgaaagaagccgtgttcgtcggtgaagatcagccggcagcgtccgcatccatcgttttgcagatgaaaccgggctactcgcttgatcaaaaccagatcaacgggctgtaccatctcgtttctaaaagtgttccgaacttaaaagaagataatatcgtcataatggatcaaaattctacatattatgacaaaagtgacagcggtgcagggtccgtttctgacagttatgcatctcagcaaggtattaagtcgcaggtcgaaaaggacattcaaaaacatgttcagtcactgctcggcacaatgatggggcaggataaggtcgttgtttctgtaacggcggatattgacttcacgaaggaaaaacgcactgaagacactgtcgaacctgtcgataaagataacatggaaggcatagcggtaagcgccgaaaaagtcgcggaaacgtataaaggcgatggcgcggccaacggcggcacggccggaacgggaagcaatgacaccgcgaactatgccgagacaaacggcggttcaaacagcggggactacgaaaaaagcagcaataaaatcaactatgaagtcaaccgcattcataaagaaatcgcggaaagcccgtataaagtgcgtgatttaggcattcaggtcatggtggagccgcctaatccgaaaaatgccgcttccttatcggcacagagacaggctgatatacagaagattttaggaacggtcgtcagaacgtctcttgataaaaacgaaacgcaaaatcaaaacctgacagacaatgatatcaacaataaaatcgttgtatccgttcagccgtttgacggaaaaacaagcctgaacacagattcggcacaatcttcaggtcttccgatctgggtatatattacaggcggcgtactgcttgcggccattattctgcttatcattctcctcatcagaaagaaacgctcacaagaggatgaatacgaagaatatgaatatgaaacaccgccggagccggttcgattgcctgatatcaacgaagagaaaattgaaacggaagaaacagtcagacgaaaacagcttgaaaaaatggctaaagaaaaaccggaagactttgctaaattgcttcgaagctggctggacgaggattagggggaatggaaaatggcgaaacgtgatcagaacaagcttacaggaaaacaaaaagcagccatcctcatgatttccttaggccttgatgtatcagcttctgtgtacaagcatttgtctgaagaagaaattgaaaggttgactctcgagatttcgggagtcagaagcgtcgatcatcaaagaaaagatgaaatcattgaagaatttcataatatcgcaatcgctcaggactatatttcacaaggcggtttaaattacgcccgccaagtgcttgaaaaagcgctcggagaagacaaagcggtaagcattttaaacaggctcacctcttctttgcaggtaaagccgtttgattttgcgagaaaagcggagcccgaacagattttaaatttcattcagcaggaacatccgcaaacgatggcgctgattttatcctaccttgacccggtgcaggccggacagattttgtctgagctgaacccggacgttcaggctgaggtggcaagaaggattgcggttatggacagaacgtctcctgaaatcataaatgaagtggagcgggtccttgaacaaaagctgtcctcctcctttacgcaggattatacgcagaccggcggcatagaagccgttgttgaagtgttaaacggcgtagacagaggaacggaaaaaacgatccttgattcattagaaatccaagatcctgaattggcggatgaaatcaaaaaacggatgtttgtctttgaagatattgtcacccttgataaccgtgcgattcagcgcgtgatcagagatgttgaaaacgacgacctcctgctttcattgaaggttgcgagcgaggaagtcaaagagattgtcttcagcaatatgtcacagcgtatggttgaaacatttaaagaggaaatggaaattatggggcctgtgcgtttgcgtgatgtggaagaggcgcaatcaagaatcgtgggcgtcgtccgcaagctggaagaagccggagaaattgtaatcgcgcgaggcggaggagacgatattattgtctaatatcattaaacagcaaacatcattttctcctgaacaaaaacggcgcaagctatccttgcaggaagtcaggaaaacacattcccagccagaccgggaggaacctgaaaatccggaggcactcatggcctttgccaaggccgaagccgacagggtgtctgaagaagcgaaaagtcaattggatcacactcttcggcagattgaagaagagaaaaaccgctgggcggaagaaaaacaaagattgattgaagaagcgaaggcagaaggatataaagaaggcatggcattgggaaaagccgatgctcaagcagaatatgccaatctcatcagccgggccaatgccgttatggaaatggccagacaatcagtcgaggaaaaactggaaagcgctgaggaagaaattattgagctttctgttgcgctcgctaaaaaagtatggcggcaaaaaagtgacgataaagaggctttccttctgctggtcaaacaggtagtagccgaagtaaaagattatgatgacatctccatctatgtggaccctgaatattatgagacggttcatcagcatatggacgaaattcagcagctgttatacaaagaatgcagattaagcttatatgccgatgaaaaagccgcgaagggaacgtgctcgatagaaactccgttcggacgtgttgatgcaggcatagacactcagctgatgcaattaaagcaaaagcttttaacggcgcttgaggcgggagcggagcaatgaagacacagtatttaatagactcaattgaaacagcggatccgtacaaacgctacggcaaggttaaacgggtcatcgggctgatgattgaatcaaaagggcccgaaagctcaatcggagatgtttgtctcatttatccgaaaggccatgcgaaaaaagcgattaaagctgaggttgtaggcttccaggatgaaaacattctgctaatgccttatctggaagcggccagcatagcgccgggcagcattgtggaggccactggcgagtcgctccgcatcaaagtaggggcgggtttaatcggacaagttgtcgacgcgttcggcgaacctcttgacggccgggcgcttccgaaaggtttgtcccccgtttcgacggaacagccgccgccaaacccgatgaaacgcccgccgatacgggaaaagatgggtgtcggcgtcagatcgattgacagtctgctgacggtaggaaaagggcagagaatcgggatttttgccggaagcggagtcggaaaaagcaccttgatgggaatgattgcgaagcagactgaagctgatttaaacattatcgcacttgtcggtgaacgggggcgcgaggtgcgtgaattcatcgagaaggatttaggcgaagaaggcctgaaacgctcgatagtcgtagtcgcgacctctgatcagcctgcgttaatgcgattgaaagcggcgtatacggccaccgccattgcggagtatttccgcgataaaggccggaatgtgatgttcatgatggactccgtcacgagggtcgcgatggctcagcgggaaatcggcctggcagcgggagaaccgccgacaacaaagggatatacaccttctgtgttcgctattttgccccgtttgctggaaagaacgggcgcaaatgaacaaggaacgataaccgctttttatacggttctcgttgacggagatgacatgaacgaaccgattgccgatacggtgcgcggaatattagacgggcatatcgttctcgatcgggcgcttgccaacaaaggacagttcccggccgtgaacatcctgaaaagcatcagcagggtcatgtctaatatttcagacacagcgcacatagaggcggccaacaaattccgcgatcttctgtcaacttatcaaaactctgaagatctcattaatatcggagcttacaaaagagggtcatcaagagaaattgatgaagcgattcagttttatccgcagcttattcaatttttaaaacaaggaacggaagaacctgctcaattggaagacagcattgcggcattgacgagtctgacaggaaaagaggaataaacatcatggcgtaccaattcagatttcaaaagctgctggaattaaaagaaaatgaaaaagaccaaacattgactgaatacagacaatcggtttctgaatttgagacagtggctgaaaaactatatgaaaatatgagcaaaaaagaattgctcgaaaaagacaaagaatcaaagctgaaatgcgggatgagcgttcaggaaatgagacattatcagcaattcgtttccaatcttgagaacaccatctatcattatcaaaagcttgtcatcatgaaacgaaatgaaatgaatgagaagcaggaacagctcaccgaaaaaaacattgaagtaaagaaatttgaaaaaatgcgggaaaaacaatttaatatgttcgcacttgaagacaaagctgcagagatgagggaaatggatgacatttcaatcaagcagtttatgattcaggggcattaggagcgaatgaaatggccgaaaaagaaaagagatctggaaagttcggttcaatcctgctttttatcatgatcccgctgatttttctgatcatcgtcgcaagcatcatcctttgggctgccggcgttgatgtgatgaagccgattcaggaaacagccgctaaaacgcctgttttaaaagaattggttcccgaaacgaaagaaatgaaaagcgcggcggaaaagcagaaggaagacagaacggcttctcttgaaaagaccataaaggaacaaaaaagtgaaattaacattttgaataaagatttagatacaagcaagtccgaaatcgataatctgaatcagaaaatccgttcgctgaaacaggaagctgaacagcagcagaaaacgaagacggatgaaacgaaaaaagacgcttcggattcagccggaaaagataaaatgatcaacatctataaaagtatggacagcggtaaagcggcaagcattatcgtaaagctgaaagaaaaagaagccctcgatattttaaacggattaagtaaaaagcagcttgctgaaatcttgacgaaaatgactcctgaacaagcggctaaatatacagaaaaactatccgctgacggaaataaggagtgatgtaagttgaagctgcttgaattaacgggtaatcgtacgcagactgcgcaaaacagcaatgtgaagatgaatgtaaacagcttaggtctatttcagaactggctcctgtcggaaatcacttctccccggcagcccggagatgaaacaaaaacaagtgacgcagagctgaatgatgccctatcgaaaatcggtgattggctgaaagccggcccggaagataaagaattgcagcttaaacagctgcttgaggcggtaaaagctcttgaaggaaagcagacggctgaaacagctcttcctttattgaaacagcttgccgaatccgttgaagacatgttagcgggaaaacagcatggggcgaagcctgaaacgaatgagccggattcttccgcaaaagacggggattccgtcaaggatgcgcttgagaagggcctgcttttcattcaagaagccgtattccagctcttcacatctcagcaggaactgccggacagcacgcaggcaaaggcggtttaccaggaaggcgcccgtttattagaggcattgaaaaaacaaggtgttccggaccgcgtgattcaagacctgcggcagacattttttccgaaaaacgaatctgcatctaaactttactccatgacagccgctgagctgaagagctttcaaagcgtcgcggagcagcttgcgggcctttctcaaaagggaacaaaggaatgggatatggctgaaactgagctgaaagcttttgtgttatctcaatcatctgaatcatcccaagagtcagccgggaaaacggaacagcaaaacggcggcacggtttctcacgcaaaggcgcctgacagcaaattgtctgcacatatactgttttcgggaacgagaagccttgccggcattcagcaagcgtccgcaggagctgaacagcagccggcagaaaataaaccgttaacggatcaggtcatcagcggctggaaacagatgaaatacacgcctttcgggaaaacaaccggaagctttacgattcgtcttaatcccgagaacctcggatttgtcacaattaaggtgacaaacgaaaacgggatgtttcaaagcaaaataatcgcatccagccagtccgcgaaagagctgctggaacagcatcttcctcagctgaaacagtcgcttccgaatatgtcggtccaggtcgaccgttttacagtcccgcttcaaggcggggatcagcagcctgtttacgggcagacggccgatcacaataaacagcagcatcagggacagagagagcagaagaacaagcagcagtcaggcgatttcggagatatgctggaggagctttctctcaatgaaatggaggaagaataggtgacatcagtaaactcggattatgccgcggcgggcgcttcaaccacttcaaacgcgaagagcacctccgcagtaaacagcagtacgaatttagggaaagacgaatttctgaagatcttaatgacacaggttcaaaaccaggacccgctcaatccggttgatgacaaagaattcatcagccagatggcgacattttcttcattggaacaaatgatgaatatgaatacgacgatgactaaatttgtagaaaatcaagatccgtttacgatgtatgtgaactggatcggcaaaaatgtcacattcagcgacagcgacgggaaggatcagacaagcccagtcaattcagtcaagcattcaaacggcaattacgtgctcgtgcttgaaaatggcaaagaggtcagtccgtggaatgtcacggccgtcagcgaaacatctaaataaaaagaaacccagggggaatttaacatgttacgttcattatattccggtatcagcggcatgaaaaactttcagacaaaactagatgtaatcggcaataacatcgccaacgtcaacacagtgggatttaagaaaagccgcgttacatttaaagatatgatcagccagacagtcgccggcggttcaaacgtgaccaattcaaaacaaatcggcctgggtgccgcgacttcttccattgatgtcgttcattcaaccggcgccccgcaggctacacagaataaaaccgacctagccattgacggagacggctactttcagattaatacaggttcgggaatcgtttacacacgtgcggggaatttcggaaaggacaatcaaggcaaccttgttacgactgacgggtactaccttgaaaaaatcggcggcggcaaaatcaatattccgactgatgcgaaagattacagcatcggtgcagacggaaccgttacatacactgatgcaggggatgcggttcatgatgccggacaaatcggtctggtcacgttccctaacagcgccggtctggaaaaaatcggaggcaacctttacagagaatcattaagttccggagctgcgagcgcagtcaccactccgggcgaaaacggaacgggtaagcttttggcaggctatcttgaaatgtcaaacgtagatctgacagatgaatttaccgaaatgatcgttgctcagcgcggtttccaatcaaactcaaaaatcattacgacttcagatgaaatccttcaggagctggttaatctgaaacggtaaggagggaggagaggcggttaggccgcttctccggattgcatgattcaagtcacccgtttaaacggccagccttttacgctgaacgcgctgtttatcgaacagattgagtgcttccccgacacgacgattacactgtccaacggcaaaaagttcgttgtgaaagaaccggaagaagcagttctcaaaaaagtcatatcgttttaccatagcatacaaatattttcactggatcagggaatagaggaagaagaatgaagaaaaaattagtcatcattttgctgattattttaattgtcatcgccggcctcggaacggcagcatattttgtcgtcagcggacattccggcaaagataaaaagccgacaattgacgaagtcgttgcagccactgtgtctgtcgacgatatcacgacaaacttaaagtctgacagcatcatccgtatcggcatcaagcttgaaaccgactcggctaaagcgaaggaagaacttgaaaaacgcgattttcaggtgaaagacaacatcatttccattttagctgacacaagcgccggagagattgagggagataaaggaagagaagcgtttaaacaatcattaaaagagaaagtaaacagctatctccaagaaggaaaagttcagaaagtgtacattacctcctttaatctgcaataaaaacaaatttgacagaatacggaggtgaagaaaatgtcaggagaagttctctcccaaaatgaaatagacgcactgctttccgccatttccacgggtgaggcggatgcggaagagctgaaaaaggaagttaaagagaaaaaagtaaaggtatatgattttaaacgggctctcagattctcgaaagatcagatacgcagtttaacccggatacatgataactttgcgaggcttctcacaacacacttttccgccaagctcagaacgtatattcatatatccgtcagctcagttgaccaggtgccgtatgaagaatttatccgttccataccgaacatgacgattttaaatttattcgatgttcatccgatggaaggcagaatcatgatggaggttaatcccaccatcgcatacgcaatgcttgaccgcgtcatgggaggcatcggcatcactcataacaaagctgacagccttacggaaattgaaacgaatattatttctaacttatttgaaaatgcactgggcaactacaaagaagcttggcaatcgattgctgatattgaccctgaaatgactgaatttgaagtgaatcctcagtttgtacagatggtttccccaaatgaaacagtcgttgtcatttctctcaatacacagataggtgaaatcagcggtgtcattaatctttgtattccccatgtcgtacttgagccgattatccctaagctttccgtacattattggatgcaatcagaccggaatgaagcgaagcccgaagaaacgaagctgcttgaaaagcgcatcatgacggctcaaattcccgttgtggctctcttgggcgcttctgaactgacaatagaagaatttttaagtttggaagtcggggactgtataactctggacaaatcagtgactgatcctcttactgtattggtcggaaacaaaccgaagtttttagggcaggccggccgggtgaatcgaagacaggcagtgcaaattttagatcacgacataagaggtgaacaagatgaacaatagattatctcaagatgaaatcgatgctcttcttaacggcacaagcagtcagtcagaggatacagaacagcctcaagaggcgaacttgtctgaacttgagcgcgatgcgatcggagaaatcgggaatatttcgttcggcagctcggctacggcgctgtccactcttttaaatcaaaaagtggacattacgacaccgagtgtgaccgtcatttcaaaaagcaaaatcagtgatgaatttcctcatccgtatgttgccattgaagtgaactacacagaaggctttgacggcagcaatttgctcgtcgtcgaacaaagcgacgcggcaatcatcgcggatttgatgatcggcggagacggccggggcgccgatccgtcactcggtgaaatccacctgagcgccgtgcaggaagcaatgaatcaaatgatgggctcggctgctacgtcaatgtcgaccgtattcagtaaaaagattgacatttctccgccaagggttgaacttctggatgtgacggaagaaaaagggaccgacagaatacctgaggatgacctgctcgtaaaagtgtcattccgtctgaaagtcggcgaattaatcgattcgagcatcatgcagctttatccgattacgtttgcgaaagatctgatcgcagacctgatgactgcggaccagcatgagtcagaggccgcagaaaccgcatcagaaccacaggaaacatacgaaacgccgcagccggaacctgccatgcagccggagccgcaggcaaaacccgagcttccgaagagacagggaaccgcaaaaaaagctgctcctgttcaagtcgctccggtagaattccaggcgtttgatcataacgaagcggcgcaaggatcaaggaataaccttgatatgctgatggatattccgctttccgttacggttgagctcggcagaacgaagagaagcgtcaaagaaatccttgaactttctgcgggaagcattattgagcttgacaagctggctggtgaacctgtggacatcctggtcaaccagcggatcgtggcaaagggcgaggtcgttgtcatagaagaaaacttcggcgtgagagtcactgatattttaagtcaggcagaccgccttaacaatttaaaataagcgaacatagaggagagaaacagattatggcacacagaattttaattgtagacgatgcagcatttatgagaatgatgatcaaggatattttagtgaagaacggttttgacgttgtagctgaagcttcagacggagcgcaggcagtcgaaaaattcaaagagcattcccccgacctagtgacaatggatattacaatgcctgaaatggacgggattacagctctaaaggaaattaaacagatcgatccgcaggcgaaaatcatcatgtgttcggctatgggccagcagtcaatggttattgacgcgattcaggccggcgcaaaagactttatcgtgaaaccgttccaagcggaccgcgtgcttgaagccattaataaaacattaagctaaagggtgtacgactgttgaaaaagagtcatggtttactagctttgatttgttatttcgttttactcaatgtacatccgttccctgcttttgcggcagagtctgataattccaccgtcaacgaatggtttgacaaacaatcaacaaacaaaacagagaaaaaaagcgatacatcgaaacaaacggctgatcaagagataggggatgcttctgcatcttctgtctccgcttttgattttgtaaagatgatcggggcgttattattcgtcattctgctgatctatggatttgtcaaactgatgaatagaagaaaccgtctgctgaagccgtttcaatatgtagaaaatatcggcggaacgtcagtcggccaaaatcgttccgtgcagctgattaaagtgggaaacagcgttctcgtagtcggtgtgggcgaaacgatacagcttttaaaagaaatagaagatgaaaaagagcgcgaggcgattctgagccaatacgaagagtcgatgtcttcaaaagtggaatggaccaagctcgtaaatccgcgtaaggatggagaaaaaaagccgcaaacgatgcttccgtcgttttcaaaagcgctgaaagaacagctgaacgagctgaaacaaagccgttctgaaggaaagaagaaaggcccttatcatcatgaatgaattcgttaatctttttaattcaagcaatccgaccgaagtcagctccactgttaaattactgctgcttttgactgtcttttcagtagcgccggggattctgattttgatgacctgctttacgagaatcgtcatcgttctgtcttttgtgagaacctcactggcgacgcagaacatgcctccgaaccaggttttaatcggccttgcgctgttcttgacgttttttattatggcgccgactttttcagagattaataaggaagccttaacgccgctgatggacaacaaaatcagtctcgatgaagcatatacaaaagccgagaagccgattaaagagtatatgagcaagcatacaaggcagaaggatctggcgctgtttatgaactatgccaaaatgaaaaaacctgaatcgattcaggatattcctttgacgacgatggtgcctgcttatgcgatatcagaactcaaaaccgcttttcaaatgggctttatgatttttattccgtttttaattatcgatatggtcgtggcgagcgtcttaatgtcaatgggaatgatgatgctaccgccggttatgatctctctgccctttaaaatattgcttttcgttttggtcgatggatggtatttaatcgtgaaatctttgcttgacagcttttagggtaggtgctaattgtgagttcagaatttgtaatttccatggcggaaaaagccgtatatgtaacactaatgatcagcgggccgctgcttgccatcgcgctgatcgtcggtttgctcgtcagtatctttcaagcgacaactcaaatccaggaacagacgcttgcgttcattccgaaaatcgtggcggtgatgcttggactgatctttttcggtccttggatgctgtcgacgattctttcgttcacaactgatctgttctctcatctgaaccgatttgcagggtagaatcaaatgaattccatcattgatttatttcccgcttttttattggtctttatcagaatctctgctttttttgtaacggtgccggtgttcggacatcggaatctgccggcggttcaccgaatcggctttgctttttttctttcggtgatctgcttcagcacgctgaaacatgcgccggaaatagaaataggggaacagtatatgctgcttgtcataaaagaggccgttgtgggcttgagcctcgggctgattgctttcatgatgatgacagccattcagatagcgggttcctttattgattttcagatgggcttttccatcgccaatgtcattgatccgcaatcaggaacgcaaagcccgctgatcggacaattcgtttatacgctggcgctgttatttatgctcagcgtaaacgcccattatcttttattggacgggatttattacagctttcagtatatcccgcttgatcaggcatttccgtcgtttggaaatgatcactttggactttttatcgcaaaaagcttcaatgccatgttcattatcgcttttcaaatgtctgcgccggttgtggccagtctgtttttagttgatttggcgctcggtattgtggcgagaacggtgccgcagctgaatgttttcgttgtcgggcttcctctgaaaatagccgtgagctttattatgctgatcgtttgtatggcggtgatgtttgtcgtcgtccgcaacatcttcagccttaccgttgaaaccatgcggaatctattggcattggtcggtgtgacatgatgagactcagactgaatctgcaattctttgccggtgaaaaaacggagaaagccactccgaaaaaacggaaggatacaagaaagaaaggacaggtcgcgaaaagtacggatgtgaatacagccgtttctttactgattatctttctttcgctgatcgcgctcggtccttatatgcgggacaggctgctgtcctttattaaaacgttttatacgaaatcgatatcattacatctgtcagcatcttccgtgcatgaactgttcgtagatacggtgaaagatatcagcctcatcctcgcgccgattatgctggtcgcgcttgtggcaggtgtcgtgagcaattacatgcaggtgggttttctgttttctgcggaagttctcaagcctgacttgaataagctcagcccgctgaaaggatttaagcggatttacagcatgagggcgattgttgaactggtcaaatccattttgaagattactgtggtcggttttgccgcctttatggtgctctggctgcattatggcgatattctccgccttccgcttttaacacctgcggaagtgctcactttcgtttctaagctcacgctttggatggggcttgcgggatcaggggctctaatgctgctggccgggcttgattatttatatcagcgttttgactatgagaaaaatatcagaatgtcaaagcaggatataaaagatgaatacaaaaaatcggagggtgatccgattatcaagtccaaaattaagcagaagcagcgggaaatggcgatgaggcggatgatgcaggaagtgccgaaagcggatgtcatcattaccaacccgacccattatgcgattgctttaaaatatgatgaaaagaaaatggccgccccttacattgttgccaaaggggtcgaccatcttgcattaaaaatcaggcagatcgccaaagaacacgatgtcatgacgattgaaaacaggccgctcgcgcgtgcgttatatgatcaggttgacattgaccaggctgtgccggaagagtttttcaaagtcattgcggaaattttggcttatgtatataaaacgaaacaaaaagtatagcgaatttcagattcaaaaggagagaaaaacagcatgtcaacaagagatttatcggttttaataagtgttgtcctcattgtggcaatgctggtgattccattccctccatggttgttaagtattttgatcatcattaatatctctcttgcgttgatcgtgcttctcaccacaatgaatatgcaagaaccgctgcaattctcgatattcccgtcattgctgctgttattgacgctgtttcggcttgcgctcaatgtgtcgacgacacgttcgattctttctcacggagaagggggaaaggttgttgagacattcgggaatttcgttgtcggcggaaatgtgctggtagggcttgttgtcttcattatcttaattattattcagtttatcgtcattacaaaaggcgccgagcgggtatcggaagtggcggcgagatttacgctcgatgcgatgcccggaaagcaaatgagtatagacgcggatttaaatgccggcatgattacggagcaggatgcaaagcacagacgtgaaaaagtcgcccgggaagcggatttttacggcgccatggacggtgcgagcaaattcgttaaaggggatgccatcgcggggatcatcatcgtgatgatcaatattattttcggaatcgtaatcggcatgctgcagcaggggatgagcatacaagaagctgcgtctcactttacaatgctgacggtcggtgacggtatcgtttctcaaatgccggccttgctcatttcaacggctacggggattgtcgtgacgagagcggcatctgaaggaaacctcggtcatgatattacaggccagctgtttgcttatccgaagctcttgtatgtagccgcgggaactgtacttttgctcggtcttcttacaccgatcggcattctgctgacggggccgatcgccggtctgcttgcattcggcgcttatatgctgtccaaagcggataagccgagcgaagaagaggaagaaattcttgaagaagaggctcaggcggatgaactgaaaagcccggaaagcgttgtgcagcttttacatattgatccgattgaatttgagttcggatacggactcgtgccgcttgcagacgcggggcagggcggtgatcttcttgaccgcatcgtcatgatcagacgtcagcttgcgcttgaattgggacttgtcattccggttgtgcgcatcagggataacatcgcactccagccgaatgaatacagattgaaaattaaaggcaatgaagtcgctaaaggagagctcctgctggatcattatttagcgatgtcaccgacgcctgaagatgacgtcattgaaggaattgaaacgattgaaccgtcgttcggacttcccgcaaaatggatcagcgaagctgcaaaagatgaagcggacatgctggggtatacagttgttgatccggcgtcagtcgtatctacgcatattacagaaaaaattaagcagcatgctcatgaactggtcggcagacaggaaacaaagcagctgatcgatcatctgaaggaaaattatcctgtgcttgtcgaggaagtcacgccgaaccctctttctgtcggcgatattcaaaaggtgcttgccaaattgctgagagaaaaagtttcaatcagaaacttggtgaccatttttgaaactcttgccgattacggaagattaacgacagattcagaccttttgacagaatacgcgagacagtcgcttgccaaacaaatcacggcacaatatgcgagagagcatgaaacgctgaaggtcatcacatgctcaggccgggtggaaaaagcgattgcagacggggttcagcagactgaacagggcaattacctgtcactcgaccctgaggtttcggacagcatcatccgttctgtcgctaaagaggccgagcagctttccatccgtcaggagtcggcgattcttctttgctcgcctgctgtcagaatgtatgtaaaacagctgttagaacggtatttccctgatcttccggttctttcttataatgagctggaagcaaatgttgaagtacagagcattggagtggtggatatttaatgaaaataaaaaaatttacagccgcttcaatgcaggatgccgcgaagcaaatcaaaaaggaactcggcaatgatgccgttattttacattccaaacaagtaaagaaacgaaaatggctggggctgcggtcgcagcaggccgtcgaagtgatagcggttttagatcgtgacgtcagggaagcgagaaaaacgccgccggctgccgctgaagaaatgaaaaagacggaaacggcggagaaagctgagcctgttcagccgccgcgccttccggatcaaagtatttccggcgaactggcgcatttgaaagaagtgctccctgaaccattaaaaaaagccgagagactattgaagcaagccgggcttcctgatcatacgcaaaacgctgtactcagtgaattgctcagttcttcaattgtttccggagatttaactgaagataatgtcagctcaaagctgcaggatttgttagtgaaaaaactcccttcgacagacaggtggcaggaagggattcaatcaaaatacgtcgtgcttttcggttcaaccggggccggcaaaacgactacacttgcgaaacttgcggcctcatcaatgctgacagagcataaaaaaattgcctttatgacgacggatacttaccggattgccgcggtcgagcagctgaagacatatgcggagctgcttcaggctcctcttgaagtatgctattcaaaggaagaatgtctgaaggcactggaaaaattcgctgaatacgaccatgttttcattgatacagccggcagaaactttaaagaagagcagtatattacggaattacaagagatgattccgtttgaatcaggcttacaatcctttctcgtattatcggcatctgcaaaatatgaagatatgaaacaggtgctgaaacagttttccggtgtgccggtcaatcaattcattttcacgaaaacggatgaaaccgcctcactcggctccgtgtttcaagtgctgtcggaatcaagaatcggcgccgcctatttgacaaatggacaggatgtgcctgaagacatcctatcggcttcaccaaaagagtttgtaaggatgcttttggcatgaaacccgatcaggcagagtcattaagaaggaaaatgagagagaggcaaatgatcaagccggagctttatgagaaaaaagcgaggacattagccgtcataagcggtaaaggcggcgtcggaaaatctaatttaacattaaacatggcagttgccctgcaggaaaaaggaaaaaaagcactcatcattgatcttgacatcggaatgggcaacattgatgtgctgatcggagctgcttcttcccgcaccattattgatgtgatggagaatcggcacgcgttggctcaatcactttcctccggtccgaaaggccttcgctacatatccggaggaacggggcttgaggcgttctatcaagcagacagagagaagtggtcggcttttatgaatggtctttccgctgtattaagcgattttgattacgttctgtttgatatgggagcgggactttcaaaagaacagctgccgtttattttatcggcggaagacattctcgccgtgacaacgcctgagccgacggccattatggatgcgtacagcgcgatcaaacatcttttgctcgcggatgaacggctgaccgtaaacattgccgtcaatcgcgcccgcgctcaaaaacaggcgctggacacgtacaaccgcctttctcatgcgatccacacgtttttaggcgcggaggtgcgtttcgccggctccatacccgatgatccgctagtaagtcaagccgtcattgaccaggtgccttttttaataaaaagtcctcaagcaaaagccagcaggtccgtccgtcttctgacggatgtcttgtttcaaacggaagaaaacaaaccaagagaagagaaaccggcatttattgagagattatcttcttttttattgaggaggactttacagtgattcgtgtgcttgtcgttgatgactcagcttttatgagaaagatgattaccgattttctggctgcggaagtgcagatagaagtcatcgggacagccagaaacggggaagaggcgctgaagaaaatagagcttctcaaaccggatgttgtcacgcttgatattgaaatgccggtcatgaacggaacggatacattgcggaagatcatcagcatatataaacttcccgtcatcatggtatcgagccagacacagcaagggaaggaccgaacgatcaactgcctggaaatgggcgcttttgattttatcactaagccttccggagcgatttcacttgatctttataaaattaaagagcagctgattgagagggtgattgcagccgggatgtcccgcgcacaaaaacctgaggcggcagtgaaagagtcttctatcccggaacgtccggctttggcgggatttgaaagaccgaaagcaaaatccgccaagcaggccgtattcatcgcgacctctacaggcggaccgcgggctctgcaaaaggtggttccgaaactgccgaaggatttaaaggcgcctgtatttgtcgttcagcacatgcctgaaggcttcaccgcttcacttgcagacagactcaaccatttgtcagatattcaggtcaaagaagcggaaaacggtgaagaagcgaaagacggatgggtgtacatcgcgcccggcggaaaaaatatgacggttgcagaggaaggcggaaggctccgcatcattcttgatgttcatgatacggaaagccggcataaaccgtcagccgattatttgtttcggtcggcaagccgtttatccggttacgaaaaggtagccgtcattatgacaggcatgggcagcgacggaaccgagggcgtaaaagaaatgctcagaacaggcggcgttaaaacgattgcggaatcggacgaatcctgtgttgtgtttggaatgccgaagtcagcgataaaggcgggcctcattcatgagattaaacatgtggaagatatcgcggcatccatcaccggatgtgtgaaaaaagagagggtgtgaatcaattggatatgaatcaatatttagatgtctttattgatgaaagtaaagagcacttacagacatgtaacgaaaagctgctgctgttggaaaaagatccggcagaccttcagcttgtgcatgacatcttcagagctgcccatacgctgaaaggcatgagcgcaacgatgggatatacagatctggcgcatttaacccacctgatggaaaatgtgctggacgccatccgcaacggagaaatgcccgttacatcggattggctggacgtgctgtttgaagcgcttgatcatcttgaagagatggtgcagtccattattgacggaggagacggcaaacgtgatatttctgaagtaagtgcgaagctcgacgtaaatgcggcgcatgagactgcggcttcagccgaaacagcagaaccgccggcttcaaaacaacagacttcaactgaatggaattatgatgagttcgaacggactgttattgaagaggcggaagagcaaggattcagccgctatgaaataacggtttccctgaatgaaagctgcatgctcaaagccgtgcgcgtgtacatgatatttgaaaagctgaatgaagccggggaagttgcaaaaacgatacccgccgcggaagtgcttgagacggaagatttcggaacggattttcaggtgtgtttcttgacaaagcagcctgctgaagaaattaaagaactcatcagcggcatttcagaagtggagaatgtcgaaatttctgccggtgcgccgttaaaaacggccgaaaaaccgcaagcagctgaaccggtgaaggaaactccggttaaaaaggctgaaaaacagccgaaaccgcaagcgaaaacggaagagcagccgaagcatcacagcggctcgaaaacgattcgcgtcaacattgaaagactggattcttcaatgaacctttttgaagaacttgtcattgaccgcggacgtcttgagcagatcgccaaagagcttgaccacaatgagctgactgaaaccgttgaacgcctgaccagaatttcgggcgaccttcagtctattattcttaatatgcggatggtgccggtagaaaccgtctttaaccgtttcccgagaatgatccgccagcttcaaaaggaattaaacaagaaaatcgaattgtccatcatcggagctgaaacggagctggaccgcacggtgattgatgaaatcggcgatccgcttgtccatttaatcagaaacagcatcgatcacggcattgaatcgcctgaagtgcgggtgaataaaggaaaaccggaatcgggtcatgtcgtgcttaaggcatatcacagcggcaatcatgtctttattgaagttgaagatgacggggccggcctgaacagaaagaaaattcttgaaaaagcgctcgagcggagtgtaattaccgaacgtgatgctgaaacgcttgaagataatgagatttacgagcttatttttgctcctggcttctcgactgccgatcaaatttctgacatttcaggtcggggcgtcggtctggatgtcgtaaaaaataaactcgaatcactcggcggctctgtcagtgtcaaatccgcggaaggccaaggttctcttttcagtatccagcttccgctgacactttcaattatatccgttcttctcattaaactggaagaagagacgtttgcgataccgatttcttctattatagagacggctgttattgataagaaagatatcctgcagacgcatgacagagaagtgattgatttcagaggacaaatcgttccgatcgtctatctcaaaaaagaattcggcattacagattcaaaacaggatgccgatcagttccatgtaatcgtcgtgaaaaagggcgataaatccactgcttttgtcgtggactcttttatcggacagcaggaagtcgtactgaaatcactcggcgactatttgacgaacgtctttgcgatttccggcgctacgattctcggaaacggagaagtggcgctgattattgattgcaatgcgctgatctactaaaacgacacgaggaggtgcccgcatgactgctgaaatcaaaacaggtgaaaaaatgattgtgtttatgataaacgggaaagaatacgctatctcagtttcccaggtgaaatcaattgaaaagtggcaaaaaccgacgagggtcccgggtgtggaatcgtatatccgcggcgttatcaatctgcgcggagtaattaccccggttcttgatttaagaaaacgtctgaaccagcctgaacaggacatcacagaagagacacggattatcatcatttcttaccgtgacgccgatgtcggatgggtcgtggatgaggccaatgacgtcatcaccgtgcatgaaaatgaaatcgaatccgcgcctgaaagccagacaaaggaaacggatgtgtggattaaacagatcgtcaagcaagataacaggctcctcaatattattgatgcgcatgcggtgctggataaaggtgcttcggcatctgcgtccggagagccgaatgcttaaaggggaaaagacaacatgagtaagtttgaagcgatcaaagaagagcagatggatattttgcgggaagtcggaaatatcggggcgggtcactcggcttctgccatggctcagctgctgaacagaaagatagacatggaagtgccgtttgcgactttattgacatttgatgagctcgctgattttttcggcggggctgaaacgccggtcgccagtatctttttaagaatggaaggcgacatgacaggctctatctttctcatcatgcctttccatcaggcggaacagtttatcagagagctgatcggaaatccggattttgatattgaccagttgggcgaagatcatttgagttcttctgctttacatgagttcggcaatattttagcaggttcctatttaacggcattggctgatttgacaaagcttgagatttacccgagcgtgccggaaatctcacttgatatgttcggcgcggttatcagtgaaggactgatggagctcagccaagtcggagagcatgccattgtcgtggatacttctatttttgaccagggcagccggcaggagctcaaagcccatatgtttatgctcccggactatgattcttttgaaaagctcttcgtctcattgggtgcggctttatgagccgtgcggaagccgcagtcgttaaagtggggattgcggatgttcaagtcgcgcgttatccggataaaatccggacttcgggactcggttcatgcgtggggctggttttatacgataaagacaaacaaacggcaggactcgttcacgtcatgctgccggactccggtttatcaaaaacggcggagctcaaccgtgcaaaatacgcggacaccgccgttaagatgacaattgatatgcttttgaaagccggctgccgcaagtttgccctgaaggcaaaactcgccgggggagcggagatgtttaagtttaaaatgacaaacgacctgatgaaaatcggtccgaggaatgtagcggctatcaaagagcagctttcattgtataacattccggtcatcagtgaagatacgggcggctcaagcggccggacgattgaatttgagccaaagtcctgcatgctgcacattcgaactgttaaacaaggtgaaacaacgatttaataaaggtatgaggtagggggataacaatgcaatccttgaattatgaagatcaggtgctttggtcgcgctggaaagagtggaaagatcctaaagccggtgatgatttaatgcgccgttacatgcctttggtcacatatcatgtcggcagaatttccgtcggactgccgaaatcggtgcataaagacgatctaatgagccttggtatgcttggtttatatgatgccctagaaaaatttgaccccggccgggatttaaaatttgatacctatgcctcgtttagaattcgcggtgcaatcatcgacgggctgcgtaaagaagattggctgcccagaacttcacgggagaagacaaaaaaagtcgaagcggcaatcgaaaaacttgaacagcgctaccttcggaatgtgacgccttcagagatcgcagaagagcttgggatgacggagcaggacgtagtatcaacgatgaatgaagggttttttgccaatctcttatcaattgatgaaaagcttcacgaccaggatgacggtgagaatattcaagtgatgatcagagatgacaaaaatgtgccgccggaagaaaaaatcatgaaggacgagctgatcgctcagcttgcgggcaaaattcacgagctctctgaaaaagagcagcttgtcgtcagtttattctataaagaagaactgactttgaccgaaatcggacaagtcctgaacctttcgacgtcgcggatttcacagattcattcaaaggcgctgtttaaattaaagcacctgcttgaaaaagtaattcaataatgaactcatggttagcgagtgaaaaacatgtcaacactattatggcttttaagctttgtgcttcacggcgtactgctttatgccgtcattattctgtacacgaggttttcagccctcaaggagacggagcgccagcagaagaagattcttgaagagacggaaaacacccttgcagcgtttctgcttgagctgaaagaagaaaatgaaagactcgaagacacaaaaagccggaatgatcaagcgcctgacgcagaagacgccgaaccccggccggaaccgaaaaaagagcctgatattccggatcacatggaaaagctcatcagtgcaacggaacgggctgaaagtgacgaaaacaacggtgcgcattcgtttgaagaacgtgtttcagaattatatgaacaagggctcacccctgcggaaatcgccaaacgggtgcagagcggaaagacagaaatcgagctgtttttaaaatttcgcggcaaagctgtaaaggattcttgattgtcgcataaagctgtgttatattatgtcttggtgttaaatacacacgcttaacgatttatgcagagggtgctgcaaacggcagttctgcacaaaaatgacctaagcggaggaaaaaaaccattttattaggaggaaatcacatgtcagttatttctatgaaacaattgcttgaagctggtgttcacttcggccaccaaacacgccgctggaacccaaaaatgaagcgttacattttcacggagcgtaacggaatctacatcattgaccttcaaaaaacagtgaaaaaagtagaggaagcttacaacttcacgaaaaaccttgctgctgaaggcggaaaaatccttttcgtcggcacaaaaaaacaagctcaggattctgttaaagaagaagctgtacgctctggcatgtactatgtcaaccaacgctggttgggcggtacactgacaaacttcgaaacaatccaaaaacgcattaagcgtctgaaagacatcgagaaaatgcaagaaaacggtacatttgaagtacttccgaaaaaagaagttgttcaattgaaaaaagaattagagcgtcttgaaaaattcctcggcggaattaaagacatgaaggatcttcctgatgcattattcatcatcgatcctcgcaaagagcgcatcgctgttgcggaagctcgcaaattgaacattcctatcatcggaatcgtagatacaaactgtgatcctgatgaaattgatgtcgtaatccctgcaaacgatgacgcaatccgcgctgtcaaacttcttacttctaaaatggcagatgccattcttgaagcgaagcaaggcgaagaagaagcggaagctgctgaagagactgcacctgaaacagaaacgacaactgcgtaacctaatcaaaaggtgataagagggactgccttttatcaccttttttcaagaaaaatgtatctatacatatcttgtttacacatataaggaggaattcaaatggctattactgcacagcaggtaaaagaactgcgtcaaaaaacaggcgctggtatgatggactgtaaaaaagcattgactgaaactgacggagatatggacaaagcaatcgaccttctgagagaaaaaggaattgcgaaagcggctaaaaaagctgaccgtatcgctgctgaaggttctactcttattaaaactgacggcaacaaaggcgttatcttagaagtaaactctgaaactgatttcgttgcgaaaaacgaaggcttcaaagagcttctgaacacgcttgctgaccaccttcttgcaaacgctcctgctgatcttgaagaagcgttgggtcaaaagatggaaaacggttctactgttgaagaatacatcacaagcaatgttgctaaaatcggagagaaaatcactcttcgccgttttgctgttcttacaaaagaagacagcgaagcgttcggtgcttaccttcacatgggaggccgcatcggcgtattatccgttcttagcggaacaactgacgaagatcttgcaaaagacatcgcgatgcatgttgcagcggtaaatcctcgttatatttcccgcgaccaagtgtctgaagaagaagcaaaccatgagcgtcagatcctgactcagcaagctcttcaagaaggcaaaccggaaaacatcgtagctaaaatggttgaaggccgtctgaacaaattcttcgaagaaatttgcttattagaccaagctttcgttaaaaacccagacgaaaaagtgaaacaagttgtggctgcgaaaaacgcatctgttaaaacttacgtccgctacgaagttggagaaggcattgaaaaacgccaagaaaactttgctgaagaagttatgaaccaagtgaaaaaataatggcggaaagccttggcgaatctttcgcggcttttcaggcagtataggggacactacttgtgttccctatttttaaaactatatttacaaacctttttttctcttgcataataggaaacggcaatgtttacacttggaggttattatggaaaaaccaaaatacaatcgtatcgttttaaagcttagcggagaagcattggcaggagagcagggaaacggcattaatccgactgttatccaatccatcgctaaacaggtaaaagaaatcgctgagcttgacgtcgaagtggccgtagttgtaggcggcggcaacttatggcgcggaaaaacaggcagtgacttaggaatggaccgtgcgacggccgattatatgggcatgcttgctactgtcatgaactcacttgccctgcaggacagcctggaaacgctcggaattcagtccagagtgcagacatcaattgaaatgcgtcaggtcgctgagccttatatcagaagaaaagccatccgccacctggagaaaaaacgcgttgtgatttttgccgcgggaacgggaaacccttatttctctacggacacaaccgcagcgctgcgtgccgctgaaatcgaagcggatgtgattttaatggcgaaaaataatgtcgacggtgtgtataatgccgatccgagaaaagatgagtcagctgttaaatacgaaaaattatcttatctcgatgtgttaaaagacgggctggaagtcatggattctacggcttcttcactatgtatggataatgatattccgctgatcgtcttttctattatggaagaaggaaatattaagcgtgccgtaatcggcgaatcaatcggaacgatcgtaagggggaaataacgttgtcaaacgaagtattaacacaaacaaaagaacgcatggaaaaagcggttgccgcttattcacgtgaattggcgtcagtccgcgcgggacgtgccaacccatctctattggataaagtgacagtagaatactacggtgcccaaacacctttaaaccagctgtcttccatcaatgtgcctgaagcgcgtatgcttgttgtcacaccgtatgacaaaacggcaatcggcgatattgaaaaagcgatcctgaaagctgaccttggcgtaactccgacaagtgacggcacaattattcgcatcgcgatcccggctctgacggaagaaagacgtaaagaacttgtcaaagtcgtgaaaaaatacgcggaagaagcgaaagtagcagtccgtaatgtccgccgtgacagcaacgacgacctcaaaaaacttgagaaaaacggggacattacagaagacgagcttcgtgcttccagtgaagacgttcaaaagctgacagatgaatatgtgtcaaaaattgacagcgtcacgaaagacaaagaaaaagaaatcatggaagtttaatgaaaaactatgtacaatagataatgtgaaaagaccctctcatgtttacagggggtttttttgttaatactgttgattacattgatcatcagcaacgcaacctttttgggtgacggaggaatctcatgctcaacatactcaaaaattggaagaatcagcagaatgcggcttccaacttagaacggtatacaaaagaagacatactgaagggtgaaattcccgcacacattgccattattatggacggaaacggacgctgggcgaagaagcgctcactcccgcggattgccggacatcatgaaggaatgaaagtggtaaaaagggtgacaaagctcgcaaatcagctcggcgttaaagttctgactctttatgcgttttcaacggagaattggaagcgaccgaagatggaagtcgactttttgatgaagcttccggaagagttcctgaatacgtatcttcctgaattgatagaggaaaatgtacaggtgaaaattatcggagatgaatccgcgctcccttctcatacgtacagggcgattgagaaggccgtaaaagatacagaacaaaatgacgggctgattctcaatttcgctttgaactacggcggacgcacggaaatcgtcaatgcggcaaaagcattggccgaacaggtgaaaagcggcacgctgaatatcgaagacattgatgaagcgctcttttccgggcatttaatgacagaatcaatccaggacccggaactgctcatcagaacgagcggagaaatcagactgagcaactttatgctttggcaggtggcttacagtgaatttgtttttacagatgtcctgtggcccgattttaaagaagatcactttctgcaggcagtgggagaatttcagcagcggggccggaggtttggcggaatttagaggatggtggaaatgaaacaaagactgttaacaggtgttctggcagcggcactatttttatttttggttattttcggaggattgccgttcaccgtatttgtttacgtgatgggaagtatagcgctttttgagcttttgcggatgaaaaagctcagatttttttcttttccgggtctgatcagcttcttgttgttatggctgtatatgatgccggacaaatatcattttttcgatgcgaaaatggaagtaacgattttcgccgtattgattctgctcagctatacggtgctcgtgaaaaacacctttacgtttgacgaagtcgggtttatcgttctcgcgacggtatatatcggactgtgttttcattattttattgaaatcagaaacattgaaacaaacgggcttttgtatatcttttatgcctgcgttgtcatatggtcaacggactcaggcgcatatttcgtcggaaagtcgctcgggaagcggaagctgtggcccgaaatcagtcccaacaaaacagtggaagggtttctcggcggtattgtcatcgcccttatttttacggccgtttttcagctgtttgctcaccttccgatttcatatccggttcttttggtcatcacgcttgttctgtctgtgttcggacagatcggggatttggttgaatcagcgcttaagcggcactatgatgtgaaggattcggggaaaatccttcccgggcacggcggcattttagaccgatttgacagctttttgtttgtcatgccgttcttatactttctgcttgcgcttttttcatgagaaaggctaatatgaaaataagaccgatctggacgcatagaatgggagtggcattttgaagaatatttgtcttttaggagcaacaggatcaatcggggagcagacgttagacgtattgcgcatgcatcaagatcagttccgtctcgtctcgatgactttcggtaaaaacgccgagaaagcgatcccgttgatcagaacgtttcagccgaaatatgtagcagtcggcgacatggatacatatcaaaaagtgaaagaagcgtctttttcgcatgaatgtcaaatcggcatcggagaagaaggcctgattgaagcggcagtcatggacgaagtggatatcgtggtcaatgcgctgcttggaagcgtcggtttaatcccgactttgaaagcgattgaacagaaaaaaacaattgcgcttgcaaataaggaaactctcgtcactgccgggcatatagtgaaaggacacgcaaaacgatacggtgttcctcttcttccggttgacagcgaacattccgctatttttcaggcgctgcaaggcgaacagagcaaaaatatcgagcgcctgatcattacggcatccggcggcagtttcagggataaaacgcggcaggagcttgagtctgtaacgattgccgacgcccttaatcacccgaactggtcgatgggtgcaaagattacgattgactcggctacaatgatgaataaagggcttgaagtcattgaagcgcattggctgtttgacattccgtatgaacagattgacgttgtattacataaagagagcatcattcattcgatggttgaatttcacgacagaagcgtcatcgcccagctcggaaatccggacatgagggtgccgattcaatacgcgctgacatatccggaccggctgcctctgcctgaaacaaaaaggcttgaattatgggagatcggaagccttcattttgcgaaagctgactttgaaaggttccgctgcttacaatttgcctttgaatcaggtaaaatagggggaacgatgccgacggttttaaatgcggccaacgaagaagccgttgccgcttttcttgccggacggatttcattcttatcgattgaggacctgattgaaaaagcattggaccgccacagcgtaattcaggatccgagtcttgcggatatccaagaagtggacaaagacacccggggatacgttaattcaatactcacataaggtggtatgttcgtgaatacagttatcgcgtttattattattttcggaacgctcgtttttttccatgagctcgggcatttattgctcgcccaaagagcgggaatcctttgccgtgaatttgcgatcggcttcggccctaaaatcttttcatttaaaaagaatgaaaccgtgtatacgatcagactccttccggtcggagggttcgtccgcatggccggtgaagacccggagatgatcgaagtcaaacccggttataccgtcgggcttctttttaataaagatgacgaagtggaaaaagtcatcattaatcaaaaggaaaaatatcccgacgctttaattatcgaggtggagacggctgatcttgagcacgaaatgaagattaccgggtacgagcaggggaaagaagatgaactggcgggctttactgtcagtcagacctctttttttatcgtagacggagaagaagtgcagattgcgccttacaatcgacaattcgggtctaaacccgtatggaagcggattaaggcgattgctgccggtccgataatgaacttcatcttagcgtatgtcattctcgtcatgctcggattcattcaaggcgtgccttcaaatcagcctgagctcgggaagctgacagacaatggacgcgcagctgctgccggtttaaaagaaggcgactatatccagagcattaacggtgaaaaaatgaggtcatggaccgacatcgtgacagcggtaaaagaaaatcccgggaaaaaaatcgatgtcgccgtcaaacgggacggcaaatcgtttcatatctcggttacacctgaagctgtaaaagatgaaaataaaaaaacaatcggccgcttcggctcttatgcgccgactgaaaaaggagcgcttgcagcgattgcttacggcgcgacatctaccgttgatgtcacaaaagcgatcctgaccaatctgagcaaacttgtgacaggccagtttaagcttgatatgctttcgggtcctgtcggcatttatgatatgacggatcaagttgcaaaaaccggtattatcaacctattccagtttgcggcgtttttaagcatcaacctgggaatcgtcaacctgctgccgataccggcgcttgacggcggacggctgctgtttttattcattgaagcaatccgcggcaagccgataaaccgtgacaaggaagcatttgtcgtatttatcggcgtagctttcttaatgcttcttatgctggttgtcacatggaacgatatccagcgtttattcttataattgactagtaaaaaatcagaggtgcgaagacatgagacaaagtttgacgcttattccgaccctgagagaagtgccggctgatgctgaagcaaaaagccataagcttctgctgagagcgggatttatcagacaaaatacgagcggggtttacagctacatgcccctggcttacagggtcattcaaaacattcagaagatcgtgcgtgaagaaatggaaaaaatcaacgcggtggaaatgctgatgccggcccttcagcaggctgaaacatggcaggaatcaggcagatggtatacgtacgggcctgaattaatgcgtctgaaagaccgccacggccgtgaatttgctttaggcgcgacacatgaagaagtcattacttctctcgtgcgtgatgaggtgaaatcttataagcgtctgccgctcactctttaccagatccagtctaaattcagagatgaaaaacgcccgcgtttcgggttattgcgcggacgcgaattcatcatgaaagatgcgtattctttccatgcttctgaagaaagtctggaggaaacgtaccaaaacatgtacggcgcatacagcagcattttcgcacgctgtgaattaaacgtccgtcccgttattgccgactcaggcgcgatgggcggaaaagacacgcatgaatttatggctctttctgaaataggggaagataccatcgcttattccgatggatcctcttacgcagccaatacggaaatggcgaaagttgtcatgaacagcgagccgtcagatgaaacacccgaggcattggagaaaattgatacgccaaatgtcaaaagcattgaagagctcgcttcgttcttgcagatcgagccgagcgcctgcatcaaatcaatgctgtttaaagcggatgaccgatttgttctcgtgttagtaagaggcgatcatgaggtcaacgacgtgaaagtgaaaaaccttctgaacgcggaagtggttgagcttgcgtctcatgaagaagtagcggagaaacttggcacggagccgggatttgcggggccgatcggcgctgccggcgacattgagatttatgccgaccaagccgtgaaagtaatggtaaacgccgtttgcggcgcgaatgaaaaagaccgtcattaccgaaacgtaaacatcgaacgtgacgcgtctgtaaaagcgtatgccgatcttcgaatcattcaggaaggcgatccgtcacctgacggaaaaggcacgatccgtttcgctgaagggattgaggtcggacaagtctttaaactcggcacgcgttactctgaagcgatgaatgcgacataccttgatgaaaacgggcgtgcgcagccgatgctgatgggatgttacggaatcggcgtgtccagaacgctttctgccatcgctgaacagcatcacgacgaaaaaggcttgatctggccgaagagcgttgctccgtatgatcttcatattttggcgctgaatatgaaaaatgaagcgcaaaaagagcttgctgaacagctttacggaaaattccagacggaaggttatgaggttttatacgatgaccgcgctgaacgcgcaggcgtgaagtttgctgattctgatctgatcggccttccgatccgcatcactgtcggaaaacgtgccgacgaaggcatcgtagaagtgaaaatccgcaaaaccggtgaatctgctgaagtttcagtggatgagctttctgaatttattaagacgaagtaatcaccataacgaatcgtacaaaatcatgttaaaatagagaaaaaagaaggtacctcatcacctgcggaggtaccttcacttatgatgttttaagggagggatactgtctgaatggaacagttatcagtaaacagaagacagtttcagattcttctgcagcagcttaatatgacagatgataccttcatgacatactttgaagacggagagattgataaactgacaatccataaagcagaaaaagcctggcatttccaatttcgctttaaggctcttttgccgtatcaaatatacgattcattcatgatgaggttaacacaatcgtttgctcacatcgcccgtgtcacatcgtctgttcaggtcatcgatcctacagtgacagaggagcttgtacaggattattggacacgctgtattgaagagcttgaaggaacctcgccgccgatggtggctcttttgaatcagcagaagccgaagctcaagggaaacaaactgatcgtgaaaacaaaaacagatacagaagcatcggcgctcaaaaataaatacagcgcactgattcagcacagctatcgccaattcggatttccggaactgcagctggataccgaaattttcgtatctgaccaagaagtccagaaattccgcgagcaaaagcttgctgaagatcaggagcgggcgatgcaggcgcttatcgaaatggagaagaaggaaaaagagggcgatgaggatcaagcgccgtccggcccgcttgtcatcggctatcaaattaaagagaacgaagaaatccggacgcttgacagcatcatggatgaagaaagaagaatcacggtgcaggggtttgtgtttgatgctgaaacacgcgagctgaaaagcggacgcacgctctgcattttcaaaatcacggactatacaaacagtattttagtaaaaatgttcgccagagaaaaagaagacgccgctttgatgaaaacgctgaaaaaaggcatgtgggtgaaggcgcggggaagcattcaaaacgatacattcgtcagagacctcgtcatgattgcaaatgacgtgaatgaaataaaagccaaaacccgtgaagacaccgctcctgaaggcgaaaaacgggttgagcttcatctgcattctccgatgagccaaatggatgctgtaacgggcatcggaaagcttgtcgaacaggcgaaaaaatggggacatgaagcgattgcgttaactgatcatgccgttgtgcagtctttcccggatgcctattccgccgcgaaaaaacacggcattaaaatgatttacggaatggaagccaatatcgtggatgacggtgttccgatcgcatacaatccagctcaccgtcttttggaagaagacacatacgtcgtctttgacgttgaaacgacaggtctgtccgcagtgtatgacaccatcattgagcttgccgcagtcaaaataagaggcggagaaatcatcgataaattcgaagcgttcgccaatccgcaccatccgctgtcagcaacgacgatagagcttaccgggattacggatgacatggtccgcgacgctcccgatgtcgttgacgtcgtccgggattttaaagaatggatcggcgatgacgtgcttgtggctcataacgccagctttgatatgggatttttaaatgtggcgtacaagcgtctactgaaaacggaaaaagcgaaaaatccagtcattgatacgctggaactcgcgcgtttcctgtatcctgagtttaaaaatcaccgcttaaatacgttatgtaagaagtttgatatcgaattaacccagcatcaccgagcggtctttgacgctgaagcaacgggctacctgctgttgaaaatgctcaaagatgccgctgaaaaagacattttttatcatgatcagctgaatgagaatatgggacaatccaatgcttatcaaagatcaaggccttatcacgctacattgcttgccgtaaatgagaccggccttaaaaatctgtttaagctcgtgtctatttctcatattcaatatttctacagagtgccgcgcattccgaggtcgcagcttaataaatacagagaaggtctgttaatcggctctgcctgtgacaggggagaggtctttgaaggcatgatgcaaaaatcacctgaagaggttgaagatatcgcatcattctatgattatcttgaagtgcagccgccggaagtatacagacaccttctgcagcttgagctcgtccgggatgaaaaagcgctgaaagaaatcatcgccaacatcacgaagctcggggaaaaattgaataagccggtcgttgccaccggaaatgttcactatttaaacgatgaggacaaaatttaccggaagatcttaatatcttcccaaggcggcgccaacccgttaaacaggcacgaactgcctaaagtgcacttcagaacgacagatgaaatgctggatgctttctcctttctcggtgcggaaaaagcgaaagaaattgtggttgacaatacgcagaaagtcgcttcgatgatcaatgagatcaaaccgatcaaagacgatctgtacacgccgaaaattgacggagccgatgaagaaatccgtgaaatgagctatcagcgcgccagaagcatttacggtgaagagcttcctgaaattgtggaagcgagaatagaaaaagaattaaaaagcatcatcggtcatggattcgccgttatttatctcatctcccataagcttgtaaaacggtctctggatgacggttatctcgtcggctcccgggggtccgtcggttcatcgcttgtggcgaccttaacggaaattactgaagtgaatccgctcgctccgcactatgtgtgcccgagctgccgatattcggaattctttaatgacggatcagtcggttccggttttgaccttccggataaaagctgcccgtcttgcggcacacctttgaaaaaggacgggcatgatatcccgtttgaaacgttcttaggctttaaaggtgacaaagtacccgatatcgacttgaacttctcaggtgagtatcagccccatgcccataactacacgaaagtgctgttcggtgaagataacgtgtatcgcgcgggaacgatcggcaccgttgcggaaaagacggcttacggatatgtgaaaggctatgcgggtgatcacaacctacacatgcgcggcgcggagatcgaccgtctggtgcagggctgcaccggcgttaagagaacgaccggccagcacccggggggattatcgttgtcccggattacatggatatttacgatttttccccgatacaattcccggcagatgcgacggggtctgaatggaaaacgactcattttgacttccactccattcatgacaacctgctgaagcttgatatattggggcacgatgacccgacagtcatccggatgctccaggatttaagcggaattgatccgaagacgattccgacagatgatccggaagttatgaagattttccaaggtacagaatcgctcggcgtcactgaagagcagatcggctgtaaaacggggacgctcggtattcctgaattcgggacgcgatttgtgcggcagatgcttgaggatacgaagccgacgacgttctccgagcttgtccagatttccgggctttcccacggcacggacgtatggctcggcaacgcgcaggaactgatacacaacaatacgtgtgaactgagcgaagtgatcggctgccgtgatgacattatggtttacttgatttatcagggccttgagccttcactggcctttaaaatcatggaattcgtgcgtaaaggcaaaggcctgacgccggaatgggaagaagaaatgaaaaagaacaatgtgccgaactggtatattgattcatgcaaaaaaatcaaatacatgttcccgaaagcccacgccgccgcatacgtgctgatggcggtgcggattgcctattttaaagtgcatcacgcgcttttatattatgctgcgtattttaccgtccgcgcagatgactttgacattgatacaatgattaaaggctcgaccgccatcagagcggtgatggatgatatcagctctaaagggcttgatgcttcgccgaaggagaaaaacctccttaccgtgttagagcttgcgcttgaaatgtgtgagcgcggctattccttccagaaggtcgatctataccgttcgagcgcttcggaatttatcattgacggcaacagtctcatcccgccgttcaactcaattccgggactcggaaccaacgccgctctcaatattgtgaaagcacgggaagaaggggagttcctttcaaaagaggatcttcaaaaacgaggaaaagtgtcaaaaaccattttagagtatttagaccgtcacggctgtcttgagtcgcttccggaccaaaatcagctgtctctgttttaagctttgtgcacagcctccgagcggagtttgatttgcattaaatatatggttatggtatagttttattggaaatgctaacgattaccgaggcaaagagtggggaaacccgctcttttgtattgaacaggcaattttgcctcgacatgtccatcgttttctcaatgcccctgctcttttgaagcagggtttttatgcagaggaacggctgatatgatatcgacagcacaaggaggaaaaacatgagcaaaaaagtgactgataccgttcaaggaatggctcagcccatactggatgaccttcagcttgaactcgtagacattgaatttgtcaaagagggtcaaaactggttccttcgcgtgtttattgattccgataacggtgttgatattgaggagtgcgccaaagtcagcgaagcgttaagcgaaaagctggatgaggccgatccgatcactcagaactactttcttgaagtatcttctcctggagccgagcgtccattaaagaaaaaagccgacttcgaaaaatcactgggcaaaaatgtgtacatgaaaacgtacgaaccgattgacggtttaaaagtgtttgaaggcaaattggctgaatttgatggacaaactgttacaatagagatgacggtcaaaacaagaaagaaacgggtcaatattccgtatgaaaaaatagctaacgcaagattagctgtaacattttaatgaatgaagtattagtgtttaaggggggagaccgctaacatgagcagtgaactattagatgctctcactattcttgaaaaagaaaaaggcatcagtaaagacattatcatcgaagcaattgaagctgccttaatttccgcgtataagcgaaattttaaccaggcgcaaaacgtacgggtcgatctgaaccgtgagacgggcacgattcgcgtgttcgcaagaaaggatgtcgtagacgaggtatacgattcaagacttgaaatctcgcttgacgacgcccagcacatccatccgaactaccttgtcggagatgtcgttgaaatagaagtaacgccgaaagacttcggccgcattgctgcgcagacggcgaaacaagtggtgacgcagcgtgtccgtgaagctgagcgcggcgtgatttactcagaatttatcgatcgtgaagaagacatcatgacgggaattgtacagcgcttagacagcaagtttatttacgtgtctctcggcaagattgaagcgctgctgcccgtcaatgaacaaatgccgaatgagagctataaaccgcacgatcggattaaagtatttatcacaaaagtcgaaaaaacgacaaaagggccgcagatctatgtatcaagaacgcatcctggtctgttgaagcgtctttttgaaatcgaagtgccggaaatttatgacggaacggtcgaactgaaatccgttgccagagaagcgggcgaccgctctaaaatctccgtccgcactgatgaccctgacgttgatccggtcggttcatgcgtcggtcctaaaggccagcgggtgcaggcgatcgtcaatgaactgaaaggcgaaaaaattgatatcgtcaactggtctgatgatccggttgaatttgttgccaatgcgctcagcccgtctaaagtactggatgtcatcgtcagcgaagaagaaaaagccacgactgtcatcgttcctgattaccagctttctctggcaatcggaaaaagagggcaaaacgcccgcttagccgcgaaactgacaggctggaaaatcgatatcaaaagtgaaacggatgcaagagaccttggcatctatccgagagagcatgaagaagatgacgatttagagccgctctttatggagcctgaaacagccgaatcggatgaataagaggtgactttaggtgaataagcgaaaaaaaattcctctgcgcaaatgcgtggtaacgggggaaatgaagcctaaaaaggaactgatccgaattgtccgttctaaagaaggagagatttcagtcgatccgaccggaaagaagaacgggcggggtgcctatatcacccttgagaaagaatgcatcttagctgcgaaaaagaaaaacacattgcaaaatcaatttcaatcacaaatcgatgaccagattttcgaagaattgctggaactggcggaaaaggtgaaaaaataacatgtctggaatggaatggtttcccttgctgggtctggccaatcgagctcgtaaggtcgtgtcgggcgaggacttggttataaaagaaattagaaatgcgcgtgcaaaacttgttctgctgacagaagatgcatctgcgaatactgcaaaaaaagtatccgataaatgcaattattataaagtgccttataaaaaagtcgaaagccgcgcggatctcggccgctctatcggcaaggaatcacgtgtcgttgtcgccgtcactgaccaaggttttgcgaataagctgatcagcttgctcgattaatatttttgggggtgaacgaatggctaaaatgagagtttacgaatatgcaaaagccatcaatgtttcaagcaaggaaattttgactgcgctgaaaaacatggatatagtagtaaataaccatatggcaatgcttgaagaaaagaccattaagcagcttgatgcgaaatttaaaaaaggcggcgccggcgttacatctcagaagcctgcggaaacgaacaaaaacaagccgcaagggattaatcagcagcctgctgggaatcaaccaaacaaaattcgagacggaaagaagaatgacgtgcagaataatcaatttaacaaaaacaagaagaataacaacaacaacaaaaacaaaaacaaacgcaatcataacaacaaaaatcagtatcagcaaaaaccgctgaagccgaaaaaagagcttcctgagaaaattacgttttccggctctttaacagtcggggccttagccgaagaacttggcaaagaaccgtctgaactcattaaaaaactgatgcttctgggtgtaatggctaccattaaccaggagcttgacaaagacacaatcgaactgatcgcatctgaatacggtgtggaaacagaagaagtgattgtgcttgaagaaactgagcttgaaaaatatgaagaggctgacaaagaagaagatcttcaaatccgtccgcctgtcgtgacgatcatgggccacgttgaccacgggaaaacgaccctccttgacagcatcagaaaaacaaaggttgttgaaggtgaagccggcggaatcacccagcatatcggggcgtaccagatcgaagaaaacggcaaaaaaatcacgttcttagatactccgggacacgcggcgttcacaacaatgcgtgcgcgcggtgcggaagtaactgatattaccattttagtcgtagcggctgatgacggcgttatgccgcaaacagtcgaagccatcaaccatgcgaaagcggctgaggttccgattatcgttgccgtgaataaagtggataaagaaagcgcgaaccctgaccgtgtcatgcaggagctgactgaatacggactcgttcctgaagcatggggaggagaaacgattttcgttcctctgtctgctcttacaggcaagggaattgacgagcttgtcgaaatgattctgcttgtcagtgaagtggaagagctgaaagccaatccgaaccgtcaggcaaaaggaacggttattgaagctgagctcgataaaggaagaggatctgtcgcaacacttctcgttcaaacgggaacattgcatgtcggagatccgatcgttgtcggaaatacattcggccgcgtgcgggccatggtcaatgatctcggccgccgcgtgaaaacagccggaccgtccacacctgtagaaatcacgggcttaaacgacgtaccgcaggctggcgatcaattcctcgtctttaaagatgaaaaaacagcccgttctgtcggtgaagcacgcgcttccaagcaactggaagaacagcgcagcgacaaagcgaagctgagcctcgatgatctgtttgaacaaattaaacaaggcgatgttaaagacatcaatttaatcgtaaaagctgacgttcaaggttcagccgaagcgttaacagccgctcttcaaaaaattgaagtagaaggcgtaaaagtgaaaatcattcacacaggcgtcggtgcgattacggaatcagacatcattctcgcatcagcttcaaatgcaatcgttatcgggtttaatgtgcgcccagacggaaatgctaagagcacggctgaagctgaaaatgtagatatccgtcttcaccgtatcatttacaaagtcatcgaagaaattgaagcggcgatgaaaggaatgcttgatcctgaatacgaagaaaaagtcatcggtcaggttgaagtgcgccaaacattcaaagtgtcgaaaatcggcacgattgccggcggatatgtaacagacggccacattacacgtgacagcggactccgcctgatccgtgacggcgtggtcatcttcgaaggggaagtagacgttctgaaacgcttcaaagatgatgtgaaagaagtttcacaaggatatgaatgtggtataacgattaagaaatacaatgacattcgcgaaggcgacgtccttgaagcgtatgtcatgcaggaaatcgaaagaaagtgatcggatttgcggaatgtgaatgcatcatttatgatgcgggatcattaaaggagaaacgagccgttctgaagcggattataacgagggttcagaataagttcaacgtgtcggccgcagaaatcggctatcaggacacttggcagcggaccagcttcggaatcgctgtcgtctcttcctctcacgttcaggcggaaaaggagatccagcgcgtactcgcgtttattgactcctttcccgagatagaacggacgatcactagaacagagtggttttaacttagaggtgattgaattgagtatgagagcaaaccgtgtcggcgagcagatgaaaaaagagctcggggatattatcagccgaaagctgaaagacccgagaatcggatttctcactgtaacagacgtacgtgtttcaggtgatttgcaaatagcgaaggtgtatatctccgttctcggcggagagaaaaagaaagaagaggcgctgaaagggcttgagaaagcgaaaggatttatccgttccgaaatcggcagccgaatcagactccgcaaaacgcctgagcttgaatttgaatttgatgaatcaattgagtacggcaatcgtattgaaacattgattcacgaactgcattcagataaaccgtctgaataacgggaaagaggatgggcgagtgtcgtctgtcctcttttctgcgttttacgggatacaattgataacaaaggagcgaaagacagatggttaacggagttctccttttacataaaccggtcggcatgacttctcacgactgtgtaatgaaaataagaaaactgttaaaaacaaagaaagtcgggcatacgggaacccttgatccggaagtgtcaggcgtactgccgatctgtgtcggacgggctacaaagatcgttgagtacgtcaccgacaagtcaaaaacgtacgatgctgagatcactctcggtttctccacatcgaccgaagatcagacgggagaaacggtcagcgtaaagcctgtcagggagccgctggaagaagcggatatcaaagccgttttagacgaattgaagggaccgcaggagcaagtgccgccgatgtattccgcggtaaaggtcaacgggaaaaagctctatgaatacgccagagcgggtattgaagtggagcggccgaagcggaatatcacgattgaagatatcgcgctcacttcccctgtcacttataacgaagacacagcatcattccgctttacagtcacgtgctcaaaaggcacttacgtcagaacgttggcggtgacaatcggtgaaaaactcggctatcccgcgcatatgtcgcatctcatccgcactgcttccggcgatttcagccttgatgagtgtttcacgtttgaggaacttgaacagcaggtttcggacggaacggttgcagagcatgccgtgccgatcgatagagcgctcaatcatttgccgaaatgggtcataagtgatacattagctaagaaagctgaaaacgggtcagtgtttgacatcccggcggaattttctgcaatgacagctgacgcccgtatagcggtctgtactgaagacggagaatgtgtggccatttatatgccgcatccttcaaaaaaaggactgctgaaaccggctaaagtgctcatgcaaaaaagcgaacaataagaaaaaaggtgaccgttctgtgaagacgatacatatttctcatccgcatcatttacaaaaagaagagcagccggcgtctgtcatggcgctcggctactttgacggcgttcatttgggacaccggaaagtaatcggaacagccagacaaattgccgaagaaaaaggcctgtcgctggccgttatgacgtttcatccccacccttcccatgtgttgggcagggacaaagagccaaaggatctgattacgccgcttgaagataaaatcagccagatcggacgtttaggcgctgatgtgctgtatgtcgtaaagtttgatgaagcgtttgcgtctctgtctccaaaacagtttgccgaggagtatattttagggttgaacgcgcggcacgctgtgggaggcttcgattttacgtacggaaaatacggaaaaggcacgatggagacgctgccggacgatttaaacggcaaggccggatgcacgactgtcgagaaacagaccgagcaggacagaaagatcagctccacttatatccggtcagcgctccaggatggtgacgttgaacttgcgcacactcttctcggccagccgtattttctccggggcactgtgattcacggagacaagagaggccgcaccatcggttttccgaccgcgaatgtcggcctgcacaacagctatatcgtgccgccgacaggcgtgtatgcagtgaaagccgaaataaaaggcgaggtgtatgaaggcgtctgcaacatcggctacaaaccgaccttttatgaaaagcgtcccgatcagccgtcaattgaagttcatttgtttaattttcaacaggatgtatacggagaagacgttaaaatcgagtggtacaaacgaatccgaagcgaacggaagtttaacggcatcgatgaactgacggctcagatcgggaaagacaaacaagaagcgatccgttttttcagcaaataacggaaaaaacatcaaaagtacacaaattttattctaaaagatttgcatatgggcgcgatttttagtatcatatgtttcgtagtcttaaaaccattgcttggcaatccgaagtcaccgacggttgctaggtaactggggctaattatgatatggaggtgaaacaggatggcaattactcaagagcgtaaaaatcaactcatcagcgagttcaaaacacacgaatctgatactggttctccagaagttcagatcgctatcctaacagactcaattaacaacttgaacgagcatttgcgtactcacaagaaagatcaccactcacgtcgcggtcttcttaaaatggtaggtaaacgtcgtaatcttcttacgtatctgcgtaataaagacgtaactcgttaccgtgagttaattaacaaactaggcttacgtcgataatcgtaaaaagcgggaggattcccgcttttttatcgtattaaagcgaaaaaaataataataaaaaaacaatgaaatccttttacatactactttgacattgatatgttcaattcatttcgttcataataggagtaattgattatttcacacattaagagaggagctcgtaatcgaatgggacaagagaaacatgtctttaccatagattgggccggcagacagcttacagtagaagccggccagcttgccaaacaggcaaacggcgctgtcatggtccgctacggcgatactgcagtgctcagcacagcaaccgcatcaaaagaaccgaaaccgctagattttttcccgcttaccgttaactatgaagaaagattatacgcagtaggtaaaattccgggcggttttattaaaagagaaggccgtccaagtgaaaaggccgttttagccagccgtctgatcgaccgtccgatccgcccgcttttcgcagacggattccgtaacgaagtacaggtcatcagcattgtcatgagtgttgatcaggactgctcatctgaaatggctgcaatgttcggttcatcactcgctctttgcgtttccgatatcccgtttgaaggcccgatcgcgggtgtgacggtaggccgcattgacgggaaattcgtcatcaatccgacggttgaccagcttgaaaaaagtgatatcaacctcatcgttgcaggcacaaaagatgccatcaacatggtggaagccggagcggatgaagttcctgaagaaatcatgcttgaggcgattatgttcggtcacgaagaaatcaagcgcctgatcgcattccaagaagaaatcgtcgcagcagtcggcaaagagaaaacagagatcgaactgtatgaaattgacgaagagctcagcgcaaaagtaaaaagccttgcggagccggatcttctcagcgccattcaggttcacgaaaaacatgctcgcgaagacgcgatcaatgaagtgaaaaatgcagttgtcgcgaaattcgaagaagaagagcatgatgaagatacaattaaaaaagtgaaacagacactgtctaaactcgtgaaaaacgaagtgcgccgtttgatcacagaagaaaaagtccgtccggacggccgcggcgttgatcaaatccgcccgctttcttcagaagtcggtcttctgccgagaacgcacggatccgggctgtttacgagaggacagacgcaggcgctcagcgtttgtacattaggcgcccttggagacgttcagattcttgacggtttaggcgtggaagagtcaaaacgctttatgcatcattataacttcccgcagttcagcgtaggggagacaggcccgatgcgcggaccgggacgccgtgagatcggtcacggtgctcttggagagcgtgcgcttgagccggtcattccgaatgaaaaagacttcccgtatacggtccgcctcgtatctgaagtgcttgaatcaaacggttccacttcacaggccagcatctgcgcaagtacgcttgccatgatggacgcaggtgttccgattaaagcccctgttgcaggtatcgcgatgggacttgtgaaatcaggcgagtactatacagtattgacggatattcaagggatggaagacgccctcggtgacatggactttaaagtagccggcacggaaaaaggcgtgacagcgctgcaaatggacattaaaattgaaggcctttcaagagaaattcttgaagaagcgcttcagcaggcgaaaaaaggaagaatggaaatcttggacagcatgctcagcacgcttggtgaatcaagaaaagaactttctcaatatgcgccgaaaattttaacgatgaccattaatccggataaaatccgtgacgttatcggaccgagcggtaaacaaatcaacaaaatcattgaagataccggtgttaaaattgacattgaacaagacggcaccatctttatttcttctactgatgaaagcagcaaccaaaaagcgaaaaaaatcatcgaagatcttgtcagagaagtcgaagtcggccagctttacctcggtaaagtgaaacggattgagaaatttggcgctttcgttgaaatcttcagcggaaaagacggtctcgttcacatctctgaactagcgctcgaacgggtcggcaaggttgaggatgttgtgaaaatcggtgacgaaatccttgtgaaggtaactgaaattgacaaacagggacgagtgaatctgtcgcgtaaagcagtgctgcgcgaagagaaagaaaaagaacaggaacaacaacaatcttaaatgaaaacctaacaaggagcctgggagacccggcttctttattttgagaaagacaacagacgggttctaccttgtcctcctcatacataatgtgtgatgagggggaaggacatgttgaaaaaattcgtgccgtttgccgtttttttatttcttttttttgtttcgtttgaaatgttaaaaaacccgtatacagttgattacatagacgcaatgaaaaaagacgcggtaactgtgtcatcatcaaaagatccgctctatgaagaattactgcaaaaagcgtcagagtatgaagtgaagccgcaagacgctcggattgataaaatatggaagagtataccgggatataacggtttaaaagtcaatgtggaaaaatcctataaacaaatgaaaaaggacggagaatttcacgaagacgaccttgtctatgagcaggtaaagccgaaagtccatcttgattctctcgcgcccgaacccatttataaaggaaatcccgacaaaccgatggtcgctttcctgataaatgtcgcctggggaaatgaatacgtggagcaaatgctgcctattctgaagcagcaccaggtcaaagcaactttctttcttgaagggaaatggctgaaaaacaatcaggaactggggaaaaaaatagcggcagacggacatgaaatcggaaatcattcatacaatcaccctgatatgagcaaactgacttcaggaagcatttccgaacagctcgacaaaaccaatgcacaaatcagcgagacgctcggcatgaagccgaaatggtttgcgccgccaagcggcagcttcagaaaagccgtggtcgaccttgcggcggaaaaaggaatgggcaccatcatgtggaccgttgacaccattgactggcaaaaaccgtctcccgctgttttacaaacaagggtgctgagcaaaatacataacggagccatgattttaatgcatccgactgatccgactgcgaaaagcctggatacactgattgcaaaaatcaaagaaaaaggctacgcgctcggctcagtgtctgacttaatggatgaaaacaggctgatgaagtagcaggcagctgcctgtctttgaataggaggaacagacttgataaaacgctatacatgccaaaacggtgtaagagttgtgcttgaaaataatccaacggtgcggtctgtggcaatcggcgtatggatcgggacgggatcacgtcatgaaacgccggagacaaacggtatttcgcactttcttgagcatatgttttttaaaggaacaaataccaggtccgcacgtgaaatcgcagaatccttcgatcggataggcggccaagtgaatgccttcacttcaaaagaatatacgtgctattacgccaaagtgctggatgagcatgcaaactacgcacttgatgtgctggctgatatgttctttcattctgcttttgacgaagatgagctcaaaaaagaaaagaacgtcgtatatgaagaaatcaaaatgtatgaagacgcaccggatgacattgtccacgatctgctgagcaaagcgacatacggcaatcattcgctcggatacccgattctcgggacggaggaaacgctttcgtcgtttaacggcgattctctcagacagcatatggatgacttttacacgccggaccgcgtcgtcatttctgtcgccggaaatgtaacggaacaattcattaaagacgtggagaaatggttcggtacatacgaagcgaagggcaaagcaagcggcatcagcgagcctgagtttcattatgaaaagctgacgagaaaaaaagacaccgaacaggcgcatctctgtctcggtttcaaaggcctgaaagtcggagatccggacatttacgatttgatcgtcttaaacaacgtgcttggcggaagcatgagcagccgtcttttccaggatgtgcgcgaagataaaggactggcctattctgtatacagctatcacagttcctatgaagacagcggtatgctgacgatttacggaggcaccggcgcgaatcagctcggacttctgtctgaaaccattcaggaaacgttatcggttctaaaacgtgacggtatcaccccgaaagagctggaaaacagcaaagagcaaatgaaggggagcttaatgctcagcttagaaagcacaaacagcaaaatgagccggaacgggaaaaatgaactcctgctcggaaagcataagaccatggatgaaattatcgctgaattaaatgcggtcagcctggaaagcgtcaacggcctcagccgccgcttatttacggatgattacgcactatcgctcatcagcccgaccggcaatataccggcctcgtcttaagctgcaaagcagtctgcctctgtacggggcaggcatttttttttgctccgggtcatatagtacaaggggtggctatcatgaggctcagtgaactgtcaggtaaagaaattgtggatattaaacgggcagagcggctcggcgtgctcggccagaccgatttggaaattaatgaacaggacggacaaattaccgcgctgttgataccgacggtaaaatggttcggactgcgaaaacaaggccacgacatccgcgtcccctggaaccatatccaaaaaatcgggtcagacatgatcattttagacgttccgggggagatcacgcctcccgaagagtagatcttattcattttttgcaagcaccggctcatacagccggtgctttttttatgaaaaagacgctgtacattcaccgccctttctctttgcacatacgatgaagaggaggatgacacttaaaggatccagtaactgtaaagaaggtgaacgtttcagatgttaaccggattaacaattgcgatcattggcggtgacgcaagacagcttgagattataagaaagctgacagaacagcatgccgatatttatcttgcagggtttgaccaattggatgacggttttacaggaaccgtcaaatgcaaaattgatgagattccctttcaaaaaatagacagtatcatcctgcctgtatcggcaacgaccggagaaggcgttgtttccacggttttttcaaatgaagaagtggtattaaagcagagctatcttgagcggacaccggagcattgcgtcatttattcaggcatctccaacgcgtatcttgaggggatcgccagcgaagccggccgtaagcttgtgaaattatttgagcgggacgacatcgcgatattcaactcgattcccactgttgaaggaacaatcatgatggcgattcagcatacggattataccattcacggatcaaatgtcgccgttcttggcatggggcgcaccggtatgacgatcgcccggacgtttgcagcgttaggggcgaaagtaaaagtgggcgcgcggagttcggctcatttagcccgtatatcggaaatggggctttctccttttcaacttgaagagcttactgatcatgtaaatgatattgatatctgcattaacaccgtaccgagcttgattctgaatcaaagcgttttatcgcgcatgacgcccaagaccttgattttggatttagcatcccgtccgggcggaacggatttcaaatatgctgaaaaacaaggcattaaagcgctgcttgctccgggtcttccgggaattgtggccccgaaaacagccggacagattattgcgaacgtattgagcaagcttttggcagacttaaagaaagaggggaaataaccatgtctctgaaagggaaaagaatcggattcggattaaccggctcgcattgcacatatgaggaagtgtttccgcaaatagaggcgcttatcagtcaaggagctgaagtccggccggtcgtgacatcaaccgttcaatcgaccgatacccgctttggggaggggggagattgggtcagaaaaattgaagaaacaacaggctttgaggcgattgattccatcgtaaaagcggagccactcgggccgaaacttccgctcgactgcatggtcatcgcccctttaaccggaaattcaatgagcaaactcgcaaatgcgatgaccgacagccccgtccttatggctgcgaaagccacgatccgcaacggccgcccggtcgtgctcggaatttcgacaaatgacggactcggtttaaacggaacgaatttaatgaggctgatgtccgcaaaaaacatatatttcatcccgttcggccaggatgaccacgtgaaaaaaccgacatcgctcgtcgccagaatggatctccttccgattacggtagaaaaagctcttttgcaccagcaggttcagccggtgctcgtacaccatcatgaataaaaaatcatgatgacagaaaatcattccggaataaaaaaattcggtcaatccgtgactattctatggtaaaataaaacgtaaaatgcaaagtcaattcaacaaatgatgcttaattggcggaaggagttttacagatgggaagaggattacacgtagcagttgtcggagcgacgggagccgtaggacagcaaatgctgaaaacactggaagacagaaactttgaaatcgaaacactcacactactatcctcaaagcgttctgctggtacgaaagtaacgtttaaaggcgaagaatatacagtgcaggaagctgttcctgaaagcttcgaaggcgttcatatcgcgttattcagcgccggcggaagcgtatcacaaagcttggcgcctgaggctgtaaaacggggagccatcgtgattgacaatacgagcgcattccgtatggacgaaaatacaccgctcgtggtgcctgaggtgaacgaaggtgatctgcacaaacataacggcattatcgccaaccctaactgttcaacgattcagatggtggctgcgcttgaaccgatccgcaaagcgtacggtttgaaaaaagtcattgtatctacttaccaagctgtgtccggagccggcaatgaagcggcgaaagaattgtacagccagacaaaggcgattttaaacaatgaacccgcagaaccgtccattatgccggttaaaggcgacaaaaagcattatcaaatcgcatttaacgccattccgcaaattgataaattccaagacaacggctatacgtttgaggaaatgaaaatgattaatgaaacgaaaaaaatcatgcatatgccgaagctggaagtggctgcgacatgtgtaagactgccgattgaaacagggcattcagaatctgtttacattgagcttgaccgtgatgacgcaaccgttgaagatattaaacagcttttaaaagaagctccgggtgttacgcttcaggatgatccggcggagcagctttacccgatgcctgctgattgcgtcggcaaacgcgatgtatttgtaggaagaattcggaaagatttggacagagcaaacggttttcatttgtgggttgtttctgataacctgttaaaaggcgccgcttggaactcagttcaaatcgcggaaagcctgcaaaaactgaacctcgtataaaacaaacgtattttctataggcgaacagaagagagtaaggctctgcctgctctcttctgttacgtcagactaatttggagtgaaaatagtgaagatcattgttcaaaaattcggcggaacatccgtaaaagatgacaaaggccgcaagcttgcgctagcacacataaaagatgccataagtgaaggttataaggttgtcgttgttgtatcggcgatgggaagaaaaggagacccgtacgcgacagattctttaatcgggctcctttacggcagccagtccgacatttctccgagagagcaggatatgcttctgtcttgcggagaaacgatttcgtccgttgttttttccagcatgctgaaggaaaacggcataaaagccgcagctttaacaggagctcaggccggctttttaaccaatgcccagcatactgacgccaaaattatagaaatgaaaacagagcggcttttcgctgcactcgccagccatgatgccgtcgttgtcgcaggctttcagggagcgactgaaaaaggcgacacgacgacgatcggcagaggtggaagcgatacatcagcggcggcgctcggcgcggcggttgatgctgagtttatcgacatttttacggacgtggaaggtgttatgacagccgatccgagaatcgtggaaaatgctaagccgcttccgaatgtcacatatacggaaatctgcaaccttgcttatcaaggcgcgaaagtcattcatccgcgcgcggtggaaatcgccatgcaggcaaaggtgccgatccgcgtgcgctccacttattcaaaagacaaaggcactttggtgacgtcccatcattcgtctaacatcggcagcgatgtattcgaacggctgattacggggatcgcccatgtgaaagacgtgacgcaatttaaggttcccgccaaaatggggcaatacaacgttcagactgaagtctttaaagcaatggcaaatgccggaatcagtgtagatttctttaacattacgccgagtgaaatcgtatataccgtagccggcagtaaaacggaagccgcgcgcagcattttggctgaattaggatatgagccgacagtgacggaaagctgtgcgaaagtgtcagcggtcggcgccggaataatgggtgttccgggtgtcacgtcaaaaatcgtctccgcactttctgataaaggcattccgattctgcaatctgccgacagccatacgacgatctgggtgctcgttcatgaaaaagatatggtaacggccgtaaatgcgctgcatgaagtgtttgaactttcaaagtaaatgtgattgaatcatgatgaggtgaaaaaaatgaatgtcggaaatatatctacagcgatgattaccccctttgacagtaaagggaatgtagactttcaaaaactgtctacattaatcgactatttgttgaaaaacggcacggattctttagtcgtcgcaggcacgaccggcgaatccccgacactttcaacggaagaaaaaattgcactctttgaatttacagtcaaagaagtgaacggacgcgtgcctgttattgcgggtacgggaagcaacaatacgaaagattccattaaactgacaaaaaaagctgaagaagccggcgtcgattgcgttatgcttgtcacgccgtattataataagccttcccaagaggggatgtaccgtcattttaaagccatagctgaagaaacgtctcttcctgtgatgctttacaacgtgccgggcagaacggtcgcttcgcttgcgccggaaacggccatcagacttgcggagattccgaatatctctgcgattaaagaagcgagcggcgatcttgatgccattacgaaaatcattgccgaaacgccggaagatttttacgtctattcaggtgatgacgggttaacgcttcctattcttgcagtcggcggaagaggagtcgtgtcagtggccagccatattgtgggttctgacatgcagcagatgattaaaaactatacgaacgggcagacggcaaccgcggcactgattcatcagaagcttctgccgatcatgaaggagctctttaaagcgcctaatccggctccggtcaaaacggcgctgcagctgaaaggccttgatgtcggatctgtgcgtcttcctcttatcccgctgaatgaagatgaacgtctgagcctgagcagcgtcatcagcgaactgtaagaaaaaatttatacagttgaaatacgcggtcattctcatttttatcgtgagtttgaccgttttgtatacatattggttttccctaaaccttccgcttcttcttgttttctaaaattgatatcagttataataggaacaagtgatgatggacgggtatgagactaggaggatacagattttgaaaaagaaaaatacagaaaacgtcagaattatcgcccttggcggcgtcggagaaattgggaagaacctatatgtcattgaaattgactcagacatatttgtagtggatgcggggctgatgcaccctgaaaatgaaatgctcggtattgatgtcgtcattccggatatttcctacttagtagaacgggctgaccgcgtgaaggccatctttctgacacacgggcacgatgaaaacatcgggggcgtcttttatttattgaacaagctgtcggtgccggtatacggaacgaagcttacgcttgcattactgagagaaaaactcaagcagtacgggcataatcgaaaagctgatttacgtgaagttcactctaaatcagtcattacatttgaatcaacgaaagtatcgttctttaaaacgattcacagtattccggattcagtgggagtcagcttcaaaacatcacttggctctattgtatgcacgggagacttcaaatttgaccagacgcctgcttatcatcaatcatgtgatattggcgaaattgccaaaatcggaaacagcggcgtgctcgccctgctttctgacagcgccaatgcggagcgcccggggtatactccgtcagaagcatatgtaagcggtgaaatttccgatgcgatgaacaattcagaaaaccgtgtcatcattgctgtattcgcgtctaatatcaaccggattcagcaagtgatacaggctgccgtccagaacggccgcaaacttgcaatcgccggaaaaaatctgcaaaacgtgcttcagcttggacgcaagctcggctatattgaagccgaagatgaaatgtttattcctgtgcaggatgtgaaaaaatatccgaagcgggacgtggcaattgttacagccggaagccatggtgagccgctggccgctcttacgcgaatggccaagcaggcgcacaagcagcttaacattgaagaaggagacaccgttgtcattgcatcaacaccgattccggggcatgaattgatatattccaaaaccgtcaacctgcttgcccgcgccggcgctcaagtcattttcgcccaaaaacgagtgcatgtgtccggtcacggttcgcaggaagaattgaaactcatgcttaatttgctgaaaccgaaatatttaattccggttaacggtgaattcagaatgcaaaaagcgcattccaaaatcgcagaagagatcggcatgaaacgcagcgacattttcttgattgaaaaaggtgatgtcgttgaattccgcggccagaatgtgaaaatcggggataaagtcacatacggaaacgttctgattgacggcctcggagtcggcgacatcggcaacatcgtgctgagagaccgccgcttattgtcacaagacggcattctcatcgtcgtgatttcactcgataagcagaagaagaaccttgtttcaggccctgagatcattacgcgcggtttcgtgtatgtcagagaatcagaggggttaattgtacaagctactgagctcgtccgctctatcgtgactgaagcgacggaaacatctgccgtagaatggtccacgctgaaacaagcaatgcgtgatgcgctgaatcaattcctttatgaaaaaacaaaacgcaagccgatgatcattccgatcattatggaagtataatgtatacaaagccggagcgcatgatgctccggctttgtttttgttcatgtcccggatggaaatcatcatctttgttcataatacaaagagacattcggaaagggtgaaagataaaatggatcatcgtatggaaaacaccgaagaacagcagcccgaaaaatcagatgcgaaagacagcattatgagcaaaattcagcagctgggagagacatctctgccgcaaatgtcccaagataccaatattcactgcctgacgatcatcggccaaattgaggggcacgtccagctcccgccgcaaaataaaacaaccaaatatgaacatgtcattccgcaaatcgtcgccattgagcaaaatccgaaaatcgaaggacttctgatcatcttaaacaccgtcggaggcgatgtggaagcggggcttgcgattgcggaaatgctcgcatccttatcaaaaccgaccgtctcaatcgtactcggcgggggccactccataggtgtgccgatcgccgtgtcatgtgatcatagttttatcgcggagacagcgacaatgaccattcaccccgttcggcttacaggtctggttatcggcgttccgcaaacgtttgaatacctggataaaatgcaggagcgggtcgtcaactttgtgacccatcattcaaatatttccgaagaaaaattcaaagagctgatgttttcaaaaggaaacttaaccagggacatcggaacgaacgtagtcggcaaagatgcggctgattacggattaattgatgccgtgggcggcgtcggacaggcgataaaaaagctgaatcagctgattgaggaacgaaagggcgaggaaggaaggatgattcaatgatcctttataccgtcatgccacaagaagtcgtttacggtcaggatatagagcaaagcgtgcatgaacaggtagattacgccggcgtgccgctgctggttgagatgaagggaaatgaagctgaagtcgtacagattttaagtacgaacccgatggattttctgaatccggacatcgctccgggacaaaaaatcaagctgaaaatctaaccggcattcagtccgtttctcgggggcaaaatatgctataataggggaatcctacagaaaaatgcagccggcaaaaggctgcttttcttcatgatgtatgattttacattttttaacgcagtaaggtgatgagtgtggcaaagaaaaaacggaaatctaaaaagaaacaagagagtaagctcaatctaaaatacgaactaagcggactgctctgtgttgcaatctcgattattgctgttttgcagctcggcgttgtgggacagacatttgtgtacttgttccgtttttttgccggagagtggtttattttatgcttaattgcgctcttccttctcggaatttcgctgttttggaaaaagaagagtccaagccttttaacgaggagaaaggcagggttgtactgtattatcgccagtattttgctgctgtctcacgtgcagctctttaaaaatctgtctcatcacgggtcgattcggtcggcaagtgtcatcggcaacacgtgggagctgtttatgattgacatgaaacagcaggctgcttcccctgatttgggcggcggcatgatcggcgcggtgctgtttgcagcttcccactttttatttgcatcaacgggttcacagatcatggcgatcgtgctgatcttaatggggctgattcttgtaacggggcgttcactgcaggaaacgctcaaaaagtggacgagccccgtcggccggtttatccgcggtcaatggcaggcatttcttgaggatatgaaaacggtcagaacgaatatgtcttcgccgaaaacaaaaaccaaatcgggcaaaaaacaaaaacgggttcagaagaaaaaagaaatgcctgagcccgaagaagaggatgaggaaatcatttcgccgatcatccattcagagccgattatttcaagcttttcagaccgtcaggaagaacgcgtcgaaccgctgattccggaaaaaacgcaggagacggcgcaaacggcaaaagatgagccttccggcggcgctcaagacagtgacgaaacggctgcggctccgccgatgacgtttacagagcttgaaaataaagattatcaaatgccttcattggacatcctggctgacccgaaacataccggccagcagaccgataagaaaaacatttacgagaatgcaagaaaactcgaacggacctttcaaagcttcggggtaaaggcgaaagtgacccaagttcatctcggcccggcggtcacaaaatatgaggtgtatccggacgtcggggtcaaagtcagtaaaatcgtgaatctgagcgatgacctcgcgctcgcgcttgccgccaaggatatccggatagaagcgccgattccgggcaaatcagcaatcggcatcgaggtgcccaatgctgaagttgcgatggtttcgttaaaagaagtgcttgaatccaagctcaatgacaagccggacgcgaagcttctgatcggcttgggacgaaatatttccggggaagccgtgcttgccgaactgaacaaaatgccccacctgctcgtagcgggggcaacgggaagcggaaaaagcgtctgtgtcaacggtattattacgagcattctgatgagggccaaaccgcatgaagtgaagatgatgatgattgacccgaaaatggttgagctgaatgtgtataacggcattcctcatctgcttgcgccggtcgtgacagatccgaaaaaggcctcgcaggctttgaaaaaggtcgtcaatgagatggagcgccgctatgagctgttctcccatacgggtacgagaaatatagaaggctataacgaccatattaagcggtcaaatgccgaagaagaagtcaagcagcctgagctgccgtacatcgtcgtcattgttgacgagcttgccgatctgatgatggtcgcttcttccgacgtggaagattcaattacgagactttcacagatggcgcgggcggcgggaattcatttgattatcgcgacacagcggccttcagtcgatgtcattaccggtgttattaaagccaacattccgtcaagaattgccttcagcgtctcatctcagaccgattcacggaccattttagacatgggcggcgctgaaaagcttctggggcgcggagacatgctgtttctgcctgtaggcgcgaataagcctgtccgggtccagggagcatttttatcggatgaagaggttgagcatgtcgtcgatcatgtgattacgcagcaaaaagcgcagtatcaagaagagatgattccggaagaagtgtcggaaacacacagtgaagtaacggatgatctctatgacgaagcggtcgatttgattatcggcatgcagacggcatcagtctccatgcttcaaaggcggttcagaatcggatatacgagagctgcccgtctgattgacgcaatggaggaacggggcgtcgtcgggccgtatgaaggaagcaaaccgagggaagtactattatctaaggaacaatatgatgagctctcttcttaaaaaggagagagttttcactgaaaatgatatcaccaaaatcattcctatttatttttttattaaaacatgatatagttgtcccaattgttcaataatttatgaaagtggtttacggaggggaaacatgtctacaaaagctgacaatcgtcacttgtacctaaaagtgattgagcgaatcaaagaggatatacaaaacggaatttacaccgaaaaggaaaagcttccttctgaatttgagctttcaaaatctatgggtgtcagccgggcaactctgcgtgaagctttgcgtatccttgaagaggagcatgtgattatcagaaggcacggtgtgggcactttcgtccatacaaaaccgctgtttctttcaggtattgaacagctcaacagcgtgacgaaaatgattcagcaggcgaacatggtgccgggtacgatttttttgtcgtctcaggtcatcacgccgtctgaggaagatatcgctagattccggcttgagcctgagcaggagcttttttatttggaacgcgtgagaacggcaagcggcactccggtcgtttactgtttagatacgattccgatgcacattctgccgaattctttctgtcatgaacaggaatctatttttgatcttttggaaaaaaactccgggtctgtgatcagctatgccgttgccgatatcgaaccgatcggatatcacgatacgatttcaccggttttggagtgcgagccggagacggcgcttttattgctgaagcaaacccactataatcagaatgatgaacctgtgctgtattcattaaattatttccgggctgataagttcagttttcatgttgtaagaaaacgtttttaagacagacgcgtcatgtgtctgtttttttatttgccgcttcaatacatactttgttttccgcaaggcacaataaaacaggaaacaaccaagtatagtgaatgggtgaataagttgagtaagaagaaaaatggaacaaaaaatatcattgctctggcttctgtaccgctcgtgatgacactcgggaattccatgctgattcctgtgcttccgatgattgaaaagaagctgtccatatcgtcttttcaagtatcgttaattataacggtctattcgattgtggcgattatttgtattccgattgccggatatttgtccgataaattcggaagaaaaaaggttcttctgccttgtcttctcatagccggtgcgggcggagcgcttgccgcgatagcttccaccgcgttcaagcatccttatcccattatcttggcggggcgggtgctgcagggaatcggttcggcaggggcggctcctgtagtgatgccgtttatcggtgatttattcaaaggggatgatgagcggattaccgcggggctcggcgacattgagacgtcaaacacggccgggaaagtattaagcccgattctcgggtcgctcttggctgcatggttttggtttatgccgttttggttcattccgtttttttcgcttatcagtttttttctcgtattgtttttggtggcaaagccggagaaacaaaaagaagccccttctatttccgaatttgtaaaaaatgtcggccgcatatttaagcgtgacggacgctggctctttacggtatttatcatcggctgcgtgattatgtttttgctgttcggggttcttttttatttatcagactcactggagaagaaatacggaattgacggtgtggctaaaggagcgcttttggcaatcccgcttttatttctatccgtcagttcatatatatcaggcagaaaaatcgggaaagaccaaggcaaaatgaagttctgcatcgttttcggaatgagtgccgtgacactgtcgtttatcggcctatggtggaatcacagtttttatttattatttatctttttgtgtgtcagcggtatcggtatcggaatagcattaccggcattagacgctgtcatcacagaaggcgtagacaacgaggaatcgggaaccatcacctcattttataacagcatgcggtttatcggagtagctgcgggaccgccgatctttgctgccctgatgtcaaatgcaggctggctgatttttattttatccgctttttgcggcattgtgtctgtatttttagcgctgttaaatatctcatcacaagcaaaagaaaaaaaggaatcattaaagacggtgtaatctgcactgtctttttttattttattttgaagattgacatgatatcgtcaagtcgttatcctttttaatagttaaacattttaactattggaaggagggggaaaagatgcatgaagaaaaagtaaagcagctgattcagcgttattccgatgtatacctgcacgtcttaaaaaaaattgacagcattatcgctgaaaaagtgaacaaagagctgacattggatcaatattacatactccgctatattatgctcaatccggattgcaaatcaattgaactggccgcggtgtgccacgtcaacaaaagcgccattacatcgatgacgaaccgcctgtatgaaaaaggctacatcaatagagaacgcagccaaagcgaccgccggagcatacttttaaatgtcacggaaaaggggacggaagtatttcaccgtgtggagcggcggattgaggaactcgtccgttcatatattatgtattttgatgaagacgaggcggagatgttcgttaatacatatgaaaaattatatcgattgatgatgacagaggaggatcagcagacataatgaaaaacattatccgagcccgctggatcatcgccgcggtatggatcgccgcaacggtgatatttatgcttacagcgcctgatatggctgaattgacacgggagaaagggcagatttccgtaccggacggatattcctcttcttatgcccatgaattgcttgatgaaatgtctgattcagatgcaccgtcttcttctgccgtcatcgtatttcacgaaaaaggcttaatgacagacaaaaaagatcgtctggaagaagccgtcagcactttgtctgaacagaaaaaagcgcttcagattaaaacggtgacttcatacttcggggagaaaaatgacgacatcaaaaaacagctgctgtcaaaagacagacaaacgatgctcgttcagctgcagcttgatacatccaaaaacgatatcctcgaaatcaaaaataaaattgataaagagctgaaaccgtacggcgtatcatacggcattacaggccagtcgctgatcgatgaagatgtgttaaaaagctcacaggacggattgaaaaagactgaatatataacggtcgcttttatcctgatcgtgctgatccttgtattccggtcagtggtcgctccgtttgtgccgcttttatctgtattgatatcttatttagtcagccagtcgattgtcgcatttttagtcgaccagctgaattttccgctctcaacttttacgcagattttcatggttgcgattatgttcggaatcggcacagactactgcattctgcttctcagcagatttaaagaagaactgtcgcatggcgctgatataagagaggcgatcgtcgtcacctacaaaacggccggaaagacggttttgtacagcggcggtgcggtgctgatcggatttgcctgcatcgggtttgcgacatttaagctgtatcagtcggcagccgccgttgcagtcggtgtcgcggtgctgctgcttgcgctcatgacgatcgtgccgttttttatggctgttttaggaaaaagactgttttggcccgttaagggtgatatttcccatcctcaaagtaaagcatgggaaacggcagggcggttttcatttaaaaggccgctcatcagtcttgcaatcgttgcggtattcaccgtcccgccgatccttctttacaaaggatcgctatcttacaacagccttgacgaaatcggggataaatatgaatccgtccgcgcgtttaatacgatttcagacgcattcggcccgggggagcttcttccggccacagtcgtcatcaaaaatgatgagcctctaaataccgaaaaacacctgattgatatcgaaaaaatcagcagagaacttgaaaaaacagagggtgtaaaaacggtcagaagcgccacgcgccctgccggaaacggattgaatcaattatttgtcacaaatcaggcaaagcagcttcaagaagggcttgataaaggcaatacaggacttgaaaaaatcacggacggattagggcatgccgcaaagtcgttagctgattcacagccgcagatcgaagagtcggggaaaagcgtcaatcagcttattaacggaacattgtctctgaaatccgggctttctgatataggcgaaaacctgaataaactgcaggcaggcgtgaatgagaataaagccggcgtcgcccagatgagaaagcagattgaagagcaaaaacaaatgctgacttcacagctcaaacaaaacagcggtctcgcttcagaaacgcaaaacgctttaaaattggtaaaaaccgtcctgccgatgaaagatgaaaccagcagacagcttgccgatttgaacaagcagcttgcccggctgccgtttgcaaaattggaagcgtcaataccgtcagtcaaaaccgatccctcttacaaagaaatcaaatcggcctttacgggtgtacagtcagccgtttccaaggcaaacgcggatgcagaagcgttttctaaacaggtcgacagtcaaaaggatcatctgcagcaagcggaaaaacaatttgcccggctggcagccgctcaaaaaaagatcgacactcaaattaacgcaatgatcaccggtctgaccagtattgaaaacggtctgcagcaagtgtcagacggacagggggctcttgcaggacaaatgccgcgccttgaatcggcggcaggacagctcgcggagggccagaaaaaaatgaagagcggtctcggtgatttttcttcccggctcagcgatctttcttcaggccttaacgatagtgtaaaagggcttaagaaagtatcaagcggcatgatgggggcgaatgattacctgggtgagcttcacaaggcctcagataaagaaatgacaggctggtttgtgccgaaagacgcgttgacaaacagtgatttcacaagcgtgtttaatacgtacatgtcagatgacagaaaaacgacagaattgaccgtcgttcttgataacaatccttactcaaatacggccattcaagatattcaagcgatcaaagcgagcgtaaaaagagccattccgaacacggatctgaagaatgcctctttcggcgtttcgggagtctccagcatgaatgccgatctgaaagaagtatcggattcagacttcaaacggacggcaatgtttatgctggcgggaatttttctgattctcatcataatgctgcgctctcttattatgcctgtttatttagtggcgtcgctcgtactgacgtatttcgcatccatcggcgtgacggaatacatctttacacacttcttcgggtatccgggcgtaaactgggccgtgccgttcttcggctttgtcattttgatggctcttggtgtggattattccatctttttaatggaccgctttaatgagctgaaaaaagaaggaacggaacccgcaatgatcagcagtatgaaaaatatgggttccgtcatcatttctgcggcgattattttagcgggaacctttgcggccatgctgccgtcaggcgttctttccttattacagattgcaaccgtggtattaacaggccttctcatgtacgcaattgtcgtccttccgttttttgtgccggtcatggtgaaaatattcggaagagccaactggtggcctttcaatttgaaaaaataacgttcaatgcctctgcctgttttcgggcagaggttttttgtttccttataaatcctccagttgatataattacatctgcgcactcttttttgcgaatcctgaaatttggccataatacatactattaaagaatgaacgaaggaggtttcacatgacttacgtaaatgaaatgaagtcaaagcacggcgggatcaccgcccacatcgtaaagactgagaaatttaaaaccgtttcgctgacgtttaaaatgctggctcctttaacgaaagagctcgtaacaaaaagggcgctgtttccgcatgtgcttctgcgcggaacagaaagccgcccgaaaaccgctgatctgcgttcttattttgatgagctgtacggcacatccgtttcagctgatctgacaaaaaagggagaacgtcatgtcattacgttcagacttgagattcctaacgaaaagtatctgaaggaccgcacaccgttattggaaaaaggccttcagcttttatcagagcttgtcttttcgcccgctttggaaaacggcgccttcctgcccctttatgtcacgcaggaaaaacggacgctgaaacagcggattcaagccgtatatgatgataagatgagatattctaatctgcgtctcgttcaggaaatgtgcaaaagcgaaccgtatgcccttcacgtcaacggcgagttcgatgatgtcgaacacattacaccgcaagagttgtatgaagcctatcaaaaagccatacgcgaagatcagctggacctgtacgtcatcggcgatgttgattcagatcaggtgaaaacggccgttgatacgtattttaaaacggaagaacgggagctgcagccttttgaaagaagcaagacgaatgaacagcccgatccgaaggaagtcattgatgaagaggacgtcaagcagggcaagctgaatatcggattccggaccaatacgacatatacagatccggattatccggcattgcaggtgtttaacgggctgttcgggggtttctctcattcaaagctgtttataaatgtccgtgaaaaagcaagcctcgcctattatgcagcctcaagggtggaaagcttcaaagggcttttgatggtcatgtcgggcattgaggtgaaaaattataagcaggccgtcaccattatcgaagaacaatttcaggctatgcaaaacggtgacttttcagaggacgatatcgcccaaacgaaagccgttattaaaaaccaagtgttagaaacgattgatacggcatacggcttagcggaatttctgtatcagcaggcttcagcccaagtggaaataccgatcgaaactttcctcgacaatatcgagaaagtgacaaaagaggacattatcaatgtcggaaagaacattaagctggatacgacttatttcttaaaagggacggggggagcatcttgactaaaccgataaatttcgaacagcttcaggaaacgctgtatcatgaaaaaatggcaaacggccttgatgtctatgtgctgccgaaacagggttttaataaaacatacgccgtgtttacgacaaagtacggttccattgacaatcaattcgttcctttaaataaggaagaaatggtacacgtgcctgacggaatcgcgcattttctggaacataaactgtttgaaaaagcggacggcgacgtgtttcaggacttcagtaagcagggggcgtcggcaaatgcctttacatcatttacacgaaccgcttatctgttctccagcacttctaatgtagagaaaaacctggaaacactcgttgattttgttcaggacccgtatttcacggaaaaatcagttgaaaaagaaaaaggcatcatcggccaggaaatcaatatgtatgatgataatccggattggcggctgtttttcggccttatcgaaaatatgtataaagaccaccccgtaaaaattgacattgccggaacggtggagagcatctctcatattacgaaagatctgctgtatgagtgctacgaaacgttttatcatccgagcaatatgctgctctttatcgtcggccccgcagatcctgaagcgatcatcagccaggtgcggaaaaaccaggagaaaaagccgtttacagaccagcctgaaatcaaacgtaaagaggttcaggagcaggaagcggttttccgccgggagcaggaattaaaaatgaacgtgcaaggctcaaaatgtcttgtcggtttaaaggcgaaagacccttataaaacggggcgggagctgttgaagcacgagctcagcatgaacctcatgcttgaatgtctcttcggaaaaagctcaccgcattacggcaacttgtacgataaaggctacattgatgaaaccttcagctttgattacacggctgaatacggattcggctttgcctctgtcggaggagatacaccagagccggataagctcgctgacgaattaaaacagatgctgcttgatgcagaatcagccgtaactgcggaaaaacttgaccttgcgagaaaaaagaagatcgggtcatttttaaaagcgctcaattcgcctgaatacatcgccaaccaattcacacgctacgcctttttagatatgagtctgtttgatgtcgtaaccgtactggagcagatcaccctggaagacgtaaagcgggtcattaaagaagaaatatcagaagacaggctgacagtctgcaaagtcgtgccaaaatcataacaaaacatccctcacgccctgagggatgtttttctggggaaagaaggagtattgattgatgaaacagacagcgctcgtaaccggagcaagcggcggaatcggacaaagtataagtgaagtcctcgcaaaaaacggatatgacgtccttttgcattatcattctaataaggaagccgcacacaggcttgcggaaaggctgagcgcatcattcggcgtaaaagcctccgctatccaggctgatctgtcctcaccggatggcgcggagacactcagccgttccgttaagcagcctgtggacgctctgatattaaacagcggcaaaagtcatttcggcctgattacggacgttacggatgacacggcgcgggagatggtgcagctgcatgtgacgagtccgtttcttttggcgcgtaatctggtgcccggcatgatccggaaaaaaagcgggggcattgtcgcgatcggttccgtctggggagaaacaggtgcatcgtgcgaggtattatacagcatggtcaaaggagcgcagcattcgttcgtcaaagcgcttgccaaagagctcgctccgagcggcgtccgcgtgaatgcggtctcgccgggtgccgttgatacaaatatgcttgatcagttcacgtctgatgaaaaagaagcgttggcagaggaaattcccgcgggccggctggcgaagccggaggaaatcgccgaagcggcggcctttttattatcggacaaggcttcctatattacggggcatatattatccgtaaacggcggctggcactgctgaaaaaaatgtgtgtatagtttgcatctgcacggacaaaataattttgtaacaacagatgaaatggaggaacccaacatgtcagtattagaaaactgggataattggaagaatttccttggcgacagattgaactatgcgcaggaaaaagggatgagtgatgaaacgatcactgacctcgcgacagaaatcggcggttaccttgcgaacgaagtcgactcgaaaaaccatcaggaaaaagtgcttgctgatctttggagcgttgcttctgaagatgaacagcgcgccatcgcaaatatgatggtgaagcttgttgaaaataacagcactcattaagaggggggatttctcctctctttttttatgttttcctctatagagcaacattcttctttctaattagagaaaaatgttttatgataaaggaaggtaaaaatttgccacaatggagggggtatatcatttggcaaagctcgaatggtattttgaatatgaaattcaagtgaaccgccccggcctgctcggggatatttcatctcttctcgggatgctgtcaattaatattgtcacaattaacggtgtcgacctttccagaaggggaatgctgctcagatgccggcatatagatcaaattaaacgattggaatcaattttaaaaacaatggagaccattaaagtaacgaagttgagagaaccgaggcttcgcgaccgtctcgcagtccgccacggaagatacattcagcgtgatgccgatgacaaaaaaaccttccgttttgaaagggacgagctcggtcttctggttgactttatggccgagctgtttaaaaaagaagggcacaaactgatcggaatccggggaatgccgagggtcggaaagacggagtccatcgttgcgtcaagcgtttgtgccagcaaaagatggcttttcgtatcatcaacgctgctaaaacaaacgatccggagccagctggttgccgatgaatacagcacggaaaacgtgtttatcctcgacggcatcgtttcgacaagacggggatctgagcgccatcttcagctcgtcagtgaaattatgcggcttccggcgacaaaggtcgtggagcaccccgatatttttgttcaaaattcggagtatacgctcgatgatttcgattatattatcgaactcagaaatgatcctgacgaagtcattacatatgaacatgcagaagaaccgcaaatgtttgaccagaccggtttttcaagctttgatttttaatattggaaggtgtttgttgtgacagaattagcaatccggcttaaagaagccagagaggaaaaagggatgtcattggatgaactccaggcggcgacgaaaattcagaaaagatacttaaccgctctggaagaaggcaattatgacgtcattcccggcaatttttatgtgcgggcgtttatcaagcagtacgctgaagctgtcgggcttgattcagatcagttattcgaagaatataaaaaagacatccctaacacgtaccatgacgatgtgtcggaaaaaatctccggtctcgccatgcaaagggagcttcctaagtccgcttcaaaggcggcggaatggcttccgaccgtccttgtcgtcatcggtgtcattatcgtcatcgcgatcatttatgcgattattcagttcggaatgagcaaatccgggcagacagacggagataaggccgtcacccaaagtgagagcaagtatgagattcctaaggattctgcgctgaaaaacgacggcaatacaaacgacgaagcgcaatctgacagcaaaaaagacacaaaagcgtcagagcagaaaaagaaagaaaaaagcagtgaaaagacggagatcaaagcggccggaacggaaggctcggcttcttcatacaacgtctccggggcagataagtataagcttgaactgattgcttctgacagcgcatggatccgcgtccgtgatgacagcggcggttctttaaaagaaggaacgctgcaaaaaggcgaaacctttaaaaaagacgtcacggatcaaaagcagattgaaatccgcacgggctatgcccctaacctgaaaattaaaatcaacggagaggttctgtcctatgaactcaatccgcatgatatgatggcgcagaccatcacaatcaagatgaaaaaataaaaggggaaaaagtcatctgaacgattaagatgactttttcttcacgtccgagtacatattattggaggggctttatgtttaacttaccgaataaaatcacactggcaagaatcgctttaattcctgtatttatgattatcatgcttgttccttttcattggggcagcgttcatataggggatgaatcgattccggtcgcgcatcttacgggagctgttttgttcattatcgcatcaacgactgactgggtggatggctactacgccagaaaactgaacctcgtgacaaacttcgggaaatttttagatccgctggctgacaaactgctggtgtccgcggcattaattacgcttgtgcaatttgaccttgcgccggcgtggatggtcatcatcatcatcagccgcgaatttgccgtaacgggattaagacttgtgctggcgggaacgggggaagttgtagccgccaatatgctggggaaaattaaaacatgggcccagatcatcgctgttgccgcgcttttgctgcataatcttccgtttgagctcgtttctttcccgttcggcgatatcgctttatgggtggccgtgctcttcacagtcatttccggctgggattattttgcgaagaactgggatgcgttaaaaacatctaactaaggaagaaggacttaaagatggaaatagcaaaaaaagcagaaatcattgcggtcggctcggagcttctgctcggccagatcgccaatacgaacgcgcagtttatcagtaaagaactggcggaaatcggtgtaaacgtgttttaccataccgctgtcggtgacaatccggagcggcttaagcaagtcatccgcattgccgaagagcgctcagacctgattattttttcaggcggcctcggaccgaccaaggacgatttgacgaaagaaaccattgcaaacacactggggcgcccgctcgttctgaatgacgaagcgttccggtcgatcgaagaatatttcgcgaaaacaaaacggaccatgtcgccgaataaccgcaaacaggcgctcgtcattgagggctcggacgttttggcgaatcatttcggcatggcgccgggaatgcttgcagagcacggctcaaggctttatatgctgcttcccgggccgccgagcgagctgcgtccgatgtttgaaaatgaagcgaaaccgctgcttcttaaaaagcttggttctaatgagaaaatcgtttcaaccgtgctgcggtttttcggaatcggtgaatcccagcttgaagctgatttagaagatatcattgacgcgcagacgaatccgacgattgcgccgcttgctgctgacggcgaggtcacgctgcgtttaacggcgaaacatgctgacgaaaaagaaacagaacggcttttaaaagaaacggaagccgccattttagaacgtgtcggtgaatttttctacggatatgatgatacgtccctggtgaaggagctttcaaaagcatgcagacaaaacaaaatcacgatttcttctgccgaaagctttacaggcggcttgttttcagagtgggtgactgatttaagcggtgcgtctcaactatttgcaggaggtgttgtctgctattccgacagcgtgaaacagcatgtgctcggcgtgaaagctgagacgctcgcagaaagcggagcggtcagcaaagagtgtgcgaaagagcttgcatccggtgtgagaaagctgaccggaagcgatatcggcatcagctttaccggggtcgcgggtcccgacccgcaggaagggcatgcgccgggccgcgtctttatcggcatttcagcggaaggaaaagaagaggtgcacgaatttcactttgccggctcaagaaccggaatcagaaagcgcgccgctaaatacggctgccatctcattttaaaaatgctggatcaaaaataaagttttaaagagcttttttctctgatttttaagtttcataagggaaattatgctcttttgcagaaaagcgaacgcggaaaaaatccgaatatgcgttcgcttttttcttggcaaatgccagtaaacaaggtatagtatatgtagtggcaagataaaggaggaaaaaataaatgagtgatcgtcaggcagccttagatatggctcttaagcaaatagaaaaacaattcggcaaaggttccatcatgaagctcggagaaaaaacggatacaagaatttcaacggtgccaagcggctcccttgcacttgatactgctctcggaataggcggatacccgcgcggacggattattgaagtatacggacctgaaagttcaggtaaaacgactgtagcgcttcacgcaatcgctgaggttcaggaaaaaggcggacaggcagcatttattgatgctgagcatgctcttgatcctgtttacgcgcaaaagctcggtgtcaatatcgaagagcttctgctttctcagccggatacgggggagcaggcgcttgagattgctgaagcgctggtgcgaagcggagctgttgatatcgtagtcgttgactctgttgcggcgcttgttccaaaagctgaaattgaaggtgacatgggtgattcacacgtcggtttacaggcgcgtcttatgtctcaggcgctccgtaagctttccggcgccatcaataaatctaaaacaatcgcaatctttattaaccagattcgtgaaaaagtcggcgttatgttcggaaatccggagacgacaccgggcggccgcgcgctgaaattctattcttccgtgcgtcttgaagtgcgccgtgccgagcaattaaagcagggcaacgacgtgatggggaataaaacgagaattaaagtcgtaaaaaacaaagtcgctcctccgttccgtacggctgaagtggacattatgtacggtgaaggaatctccaaagaaggggaaatcatcgaccttggaactgaactggatatcgtgcaaaaaagcggttcgtggtattcttatgaagaagaacgcctcggtcagggccgtgaaaacgccaagcagttcttaaaagaaaataaagacatcatgctgatgattcaggaacaaatccgtgaatattacggtttagacaataacggtgtaacggacaaagcggaagaagttcaggaagagatggaattagaagaataaaaacacgatcaaaagagcggaataagcaatttccgctcttttttttgtatgtttcaaaaaaacactggctgtttcggaaaattttatctggaatgttacaacttttttcacccttcactcgtctaacatcatggcgaaagttgaaattatatctgaggaggaaaaaagatgacgagcccccgccgcacaagaataaataaaaaaagaaagaagaagctgatgaaaacgggagggctgtttctttttctgctgcttgtcactgtttttattatgatctggaccgtcacagcgcatcatcgggagaaggaatccgttaaaaacgctcccgccgctcaatctgatacttcaaaagaccagactcaacagaaaaaagaaaagacgcaaaaagagaaaacacctaaatcaatcgatcacaataaacagatcagcaattacttgcaacagatcgggttcagcggcacagcaatgatcgtaaaagatggaaaagttgtgctgaaaaaaggctttggctatgcagaccgaaaacaaaaaattaaaaacaatccggagacatcatattatatcggttcttcacaaaaagcgttaatcgcgacggctgtcctgcagcttgaagaaaaagggctgctgcagacgagtgaccccgtcagtacatacttgccgaattttcctaacggcacgcgcatcacattgaaaaacctgctcaatcatacgtccggcataaacgggcatattgagggtcggggaccgatttctccaattgatttaatcaaggatatagaataccgcggaattaaaaggcagcccggggtttgggattacagggattccaactattcagtgcttgcttatatcgcatctcaggtcagcggggagtcttatgaacaatatataaaagaacacgtgttcaaaccggccggaatgaagcatgccggattttacaaaacatttgctgaagccaaatatcctgccgtcggctacaaagtcgatgagagcggcagtcttgtaacgccgcaccttttggacttatcgcagctttacggggcgggcgacatgtatatgagcgctgaagatctttataaatttgataaagcgatcgtaaacggcacgctcctttcaaaagaaagcttcacaaaaatgtttacagcaggaagcagtgccgcttacgggatggggttttacattgatccgggcagctattccaatcacggtgttatgcccggttacaacattttaaacagtttcagccattcggcaagcaaatatgtcatattactgtcaaacattcagaataacgccaaattaggacaggtaaacaatagaatttaccaattgcttaaccaggcggactgacagagccgtcattcacgaaaagcggatgaaggtatggtatgatatatacatgggcggcgatccgagctgaaggcgaatcgttaagctggcaagcttgacaagtatttccgacacaattacaatgaagttgtaacatttgtttttttaacatgattgttaaaccatttaaacttgacaagggcatgagagactcattccctgtgaaggttctgtatgttgagaaaatcagacaatgtacatgccggcacttatttaagcaaaaaccaagttcatagcaagaggaggtgaaagtatgaccccaatgacggttctcatctccattttgctgactctgctcggtttagttgttggctactatgttcgtaaaaccattgccgaagcaaagattgcgggcgcacgcggtgctgccgagcaaatccttgaagatgcaaagcgtgatgctgaagcactgaaaaaagaagctctgcttgaagcaaaggacgaaatccatacacttcgaatagatgctgaacaggaagttcgtgaaagacgaaatgagcttcaaaaacaagaaaaccgtttacttcaaaaagaagaaaatcttgaccgtaaacatgaaggaattgataaacgggaagcgatgttggagaagaaagatcattctctgaatgaacgacaacaacatattgaagagatggaaagcaaagtggatgagatgattcgtatgcagcagtcagaactcgaacgcatttcgagcctgacacgggatgaagcgaaacaaatcattcttgaccgggttgaaaatgagctttcacatgacatcgccatcatgacaaaagaaaccgaaaaccgtgcgaaagaagaggcagataaaaaggcgaaaaacattctgtcgcttgctttgcagcgctgtgcagcagatcatgttgccgaaacgacggtatcggtcgtcaatcttccgaatgatgagatgaaaggacgtatcatcggccgtgaagggcgtaacattcgtacgcttgaaacgcttacaggtattgacctgattattgatgacacacctgaagcagtcattctttccggatttgatccgatcagacgggagacggcaagaatcgctcttgataaactcgttcaggatggccgtattcatccggcgcgcattgaagaaatggttgaaaaatcccgccgtgaggttgatgactatatccgggaaatgggtgagcagacgacgtttgaagtcggcgttcacggacttcacccggatctgatcaagatcctcggccggttgaaattccgtacaagctacgggcagaacgtactgaaacattctatggaagttgcgtttttagccggtttaatggcttccgagcttggagaagatgcaaagcttgccaagcgtgccggtcttctgcatgacatcggaaaagcaattgaccatgaagtggaaggaagccacgtggaaatcggagtggagcttgcgaccaaatataaagagcatccagtcgtcattaacagtattgcgtcacaccacggagacgaagagccgacttccattatcgccgttctggttgctgccgctgatgcactgtcagccgcaagaccgggcgcgagaagtgaaacgctcgaaaactatatccgcagacttgaaaagcttgaagaaatctccgagtcttacgaaggtgttgaaaaatcatttgcgattcaggccggccgtgaagttcgcatcatggtgaagccggactccattaatgatttagaagcccatcgtttggcgcgtgatatccgtaaacgaattgaggacgagcttgattatccgggacacattaaagtgaccgtgatcagagaaactcgagccgtagagtatgcaaaataaagtgatgcttagcgcatcactttatttttttgagtccctgaaaaggaaggaatggaatgtatgagaattttatttatcggagatgttgtcggttccccgggccgcgacatggtaaaagaatatgtcccgaaactgaaagcgaaacataaaccgcattttacaattattaacggagaaaatgcagcacacggaaaaggactgacggaaaagatctaccacagcctgatggaagcgggagccgacgccattacaatgggaaaccatacgtgggataaaagagagatcttcgactttattgatgatgtgccgcatcttgtccggccggcgaatttcccggaaggtacgccgggcaaaggcattacttatattaaatcgaacggaaaagagcttgccgtcattaatttacaggggcggacgtttcttccgccgcttgatgatccgtttgctaaagcggatgaattaatagaagaagcgaaaaagcgcacaccgtacatttttattgattttcacgcggaagcgacaagcgaaaaaattgcgatcggctggtatacagacggaagagcctctgccgtggtaggcacccatacacacgtgcaaacggcagataaccgcattttgccgaaaggaacggcatatattactgatgtaggcatgacgggtccgtacgacggaattctcggtatggacagagaaacggtcatcaagcggtttaaaaccaatcttcccgtccggtttacggtggcggaaggtaaaactacgctgagcggagtgctcattgacatcgacgatcaaacgaaaaaggccgtaaatatcgaacggatattaatcaatgatgaccatatgttctttgaataggtgatcatgtgtttattttataaaaatattaaaaggaaaagcaggaatatagcaacttcttagtgaatatagtagaaatggaaggtagcccgctatttttgaaaagcattgtggggatggctttttggatagcaacatctaataatgattgttctaatgaacactcacttatccattgtaaaactaagggggagcagaaatggaaatcttaaaagtttcagcaaaatcaagtccaaattcagtagcaggcgcgcttgccggcgtattgagagaacgcggagccgccgaaattcaagcaattggggcgggtgccttaaaccaggctgttaaagcggttgcgattgccagaggctttgtcgcgccaagcggcgtagatttgatttgtattccggcttttacagatatacagattgacggagaagaaagaacggcgattaagttaatcgtcgaaccccgttaaaaacaaaaatatgtacattctcaacctgcttgcgtaaggcgagcaggttgtttttattgctgtcatattttctcacaatattatattgatagtacgaagagatgataaatggctttattcatataatattcaaaaaaaatcccgcccatttttccggacggaagcagttgttttcctcgagtggacactggtgtttacctcctttttatctcatgttacaatccagttattacagtgttttttcgaggaggagtgtacatgttgggaggaaagatgaaagctatcgttaaaaatgaaaacgctttcggagcaacgctgaaagaaattcccataccttccattaatgagaatgaagttctcattaaagtacaggccgcatctatatgcggtacagatgtgcatatttataattgggatcaatgggcgcagaaacgaatcaaaacacctcaagtattcggacatgaattcagcggtatcgtagcggaaacgggcaagcacgtcacaaatgtcaaaataggtgactacgtttcggctgaaacccacttcgtctgcggtacttgtgtcccgtgtttaacagaaaaacatcatgtgtgcacccatacaaagatcctcggcgtagatacagccggctccttcgctgaatatgtcaaagtgccggcccgaaatgtttggaaaaaccccgctgatatggaccccgccgtcgcctctgttcaagagccgcttggcaacgcggtgcatacggtgctggaaagcagccggcttgcgggcggttccgctgcaattatcggctgcggaccgatcgggctgatggcggtggcggtggctaaagcggccggtgcatcccgtattgcggccattgataaaaatgattacaggctggctcttgcgaagaaattgggagctgcgatcaccatttcagttgatgaggaagatccgcttgaggtgatcgacaccttaacaggcggtgaagggatcgaccttgtctgcgaaatgtcaggccacccggcagccataacacaaggattaaagatggcggccaacgggggaaggttccacatgctgagtctgccggaacgtccggtgacggttgacctgacaaatgacgtggtgtttaaaggacttaccgtccaaggcatcacaggcagaaaaatgtttgaaacatggcggcaggtatcgcacctgcttgaatccggccttgttgatctgacgccggtgatcacgcatcagtttccgcttgaagactttgaaaaagggtttgacctgatgagaaagggacagtgcggcaaagtcattttgattccataaggggagggttctataatgaaagaatttgaatttctaaaagcagagcttgataaaatgaaagaaaataaaacgtggcagcaaatgaaacaaattgaaacgaagcagggtccgtcggtggaagtcaaaggggaaaacgtgatacagctttcatcgaacaattatctcggtttgacgtcgcatccaagacttgtcgaagcggccaaacgcgccgcggaagaattcggagcgggtacggggtccgtccgtacaatcgccggaacattcacaatgcacaatgagctggagaaaaaattggcaacctttaaaaaaacagaagcggcacttgtttttcaatcggggttcacaacgaatcagggcgtcttatcaagcattcttacaaaagaagatatcgtgatctctgacgaactgaaccatgcttccattattgacgggatcaggctgacaaaagcagataaaaaggtgtaccgccatgttgatatggacgatttggaaagggtgctgaaaaaatcaatgaattaccgcatgcgcctgatcgtcaccgacggcgtattctcaatggacggcaacatcgctcctttgcctgacatcgtcaaacttgcagaggcgtacgatgcctttgtgatggtcgacgatgcgcatgcttccggcgtactcggaaaaaacggaagggggacggttaatcacttcgggcttgacggaagagtccacatacaggtgggcacattaagcaaagccatcggagtgcttggcggttacgccgcagggtcgcaggttctgatcgattacctgcgccataaagggcgtcctttcttattcagcacttctcatccgcctgcagtaacggccgcatgcatagaagccattgacgtcctgctggaagagcctgagcatatggaaaagctatgggagaacacggcgtatttcaaagacaaactggttcaaatggggctgaccctcacaaaaagcgaaacaccgatcgtgccgatattaataggggaggaagaaaaagcccaggcattatcagaccttttattgacccgcggcgtgtttgcacaaagcatcgtgtatccgacggtcgcccaaggaaaagcgagaatccgcaccattattacggcggagcatacaaaagaggagcttgaccgggccctggaagtaatccgttcagccgcaaaagagcttcagcttgtgtaagggggaaatgattccctcttttttatttcttattgattcttattctcaataaggtgtacaataataggctggcggttgtgccaaacgcttttaaccagtatacttgagggtggaagtttcggttgaaaggagacattcgaacatgaatgaaaagcaaaagcaggaaagcggacaagtgaatccggcggacaaaaaatccgaaaaggattacagcaagtattttgaagccgtatatattccgccttctttaaaagatgcgaaaaaacggggcaaagaatccgttcaatatcataacgattttaaaatctctgaagaatttaaaggccttggtgaaggcaggaaattttatatccgcacgtacggatgccaaatgaacgagcatgatacggaagtcatggcgggtatttttatggcgctcggttatgaagcgacaaattcggttgatgacgcgaacgttattttattaaacacttgcgccatccgggaaaacgctgaaaacaaagtgttcggagagctcggccatttaaaggcgctcaaaaaaaataacccggacttgattctcggcgtctgcggctgcatgtcacaggaagaatcagtcgtaaaccgcatccttaagaagcacccgtttgtcgatatgattttcggcacgcacaacattcaccgtctgccggaactgttatcagaggcatatttatcaaaagagatggtcattgaagtgtggtcgaaagaaggggatgtcattgagaaccttccgaaagtccgcaacggaaaaattaaaggctgggtcaacattatgtacggctgcgacaagttctgcacatactgcatcgtaccgtatacccgcggaaaagaacgaagccgccgtcctgaggaaattatccaggaagtcagaagacttgcaagcgaaggctataaagaaatcacgctgctcggtcaaaacgtgaatgcgtacggaaaagattttgaggatatgacgtacggtctcggtgatttaatggacgaactgcgtaaaattgatattccgagaatccgattcacgacgagtcatccgcgtgactttgatgatcatctgatcgaagtgctcgccaaaggcggcaaccttttagaccatatccatcttccggttcaatcaggaagctcagcgatgttaaaaatgatggcccgtaaatatgacagagaacgctatctggagcttgtcggaaaaattaaagcggcgatgccgaacgcttcactgacgaccgatattattgtcggttttccgaatgaaacggatgaacaatttgaagaaacgctttcgttatatcgcgaagtggaatttgacagcgcatatacgtttatttactctcctcgtgaaggcacgccggcagcgaagatgaaagacaatgttccgatgagggtcaagaaagaacgtcttcagcgccttaatgatttggtgaaagaaatttcagccaaaaaaatgaaggaatatgaaggcaggactgtcgaagtattagttgagggagaaagcaaaaataaccctgacattcttgccggctatacggaaaaaagcaagctcgtcaacttcaaagggccgaaagacgccatcggcaagattgtacgcgtcaaaatcgaacaggcgaaaacatggtcgcttgacggtgtgatggcaggagaagcaatcgaggtgaaataatgatgacgctttactcaaagaaagacattgtacagcaggctaggaaccttgcgaaaatgatttctgaaacagaagaagttgattttttcaaacgcgccgaggcgcagattaacgaaaatgaaaaagtctctgcgattattaatcagattaaaaccctgcaaaagcaagccgttaacctgaagcactacgaaaagcttgaagcgctgaaacaagtggaaagtaaaattgacgccctgcaggaagagcttgaagggattccgatcatccaggaattcagagattcccagattgaggtcaatgaccttcttcagcttgtcgcacatacgatctcaaatcaggtgacaaacgaaatcattacatctaccggaggcaacctgctgacgggagaaaccggttcaaaagtaaaacattcgaataacagctgttctatttaaacacggggccttcatcggcccgtgttttttttgccgtttaagaactaattgtaatatgtactaaattttcattgtctcaacgttttgtcctatttttactggaaagttttatcatacttaaaagtaaagtttctgggcagggctgcatacaatgaaacagaaactttgtatttttatatttttattataaaaatgcacatgagacaaatgcccagcataagataacacgaagaagaacaaggaggcctgccggaatgtctgaatacagggaaattattacgaaagcggtagttgcgaaaggaagaaaattcacccaatgcaccaacacgatctcgcctggagaaaaaccgtcaagtatactgggcggctggattatcaaccacaagtacgatgccgaaaagatcgggaagactgtagaaattgaagggtattatgatataaacgtctggtactcttacgccgataatacaaaaacggaagttgtaaccgagagagtaaagtatgtcgatgtgattaaactcagatacagagatacaaattacttagatgacgaacacgaagtcattgccaaagtgctgcagcagccgaattgtcttgaagtcaccatttctcctaacggaaataaaatcgtggttcaggcagagagggaatttttagcagaagtggtcggtgaaacgaaagtcgtcgtcgaagtcaatcctgactgggaagaagacgatgatgatgattgggaagacgatcttgacgaagaattagaggacattaaccctgaatttttagtcggagatcctgaagaataagttgaggctaggggagtttaacaccccgagtctcttttttatatataaagatatcactcttttgtttatgttataatgggattcggataagagaagatacatagtgagggattaaatgatggctagttacacgcctatgatacagcaatacttgaagataaaggcagagcaccaagatgcctttttattttttcggcttggtgacttttatgaaatgttttttgaagatgcaaaaaaagcgtcgcaagagcttgaaattacactgacaagcagagacggaggttcggctgataaaattccgatgtgcggcgtgccgtatcattccgcggcggcttatattgaacagctgattaaaaagggctataaagtggcgatctgtgagcagacggaagatccgaaggcggctaaaggcgttgtaaaaagagaagtcgtccagctgatcaccccgggaaccgtgatggatggaaaaggcatccatgagtcggaaaacaactttatcgcttccgtttccgaatttcgtaacggatacggtctcgctttatcagacttaacgaccggagaaaacctggccgtatttattgagcggattgaagatgtcatgtcagaaatttactcagtcggcgcaaaggaaattgtcgtatcaagcaagtttaacgaacatacggctgctcagctgaaagaacggtgcggcgcaacgatttctatcgaagacggggaaataacagaacgcattgaaatcgcaaagcacttgccgggcgaagagctgacagagacgtttatgcgtttatatacgtatttgcagaaaacgcaaaaacggagcctggatcatctgcagccggttcaagtatatgaattggaagaagcgatgaaaattgacctgtattcaaaacggaatcttgagctgacggaaacgatccgttcgaaaagcaaaaaagggtcattgctttggcttttagacgagacgaaaacagcgatgggcggccggcttctcaaacaatggattgaccgcccgctgatcagggcatcccaaatcgaagaacgccaggaaatggtcgagacgctgatcaatcatctgtttgagcgcgaagatctgcgcgagcgcctgaaggaagtatacgatttagaacgtctggcgggccgggtcgcattcggaaacgtcaacgcaagagatttaatccagctgaaagaatctttaaaacaagtgccgagcattaaagagcttgtaggatctcttaaccataaaaaagcaaaagaacgcgccggcttgattgatccgtgcggagatttgcttgacctgttagaagaagcccttcatgaaaacccgccgttatcgttaaaagaaggcaacttaattaaagacggctatcatcagaagctcgatgagtaccgtgacgccagcaaaaacggtaaagactggattgccagactggagcagcaggaacgcgcttatacgggcatccgttcattaaaggtcggtttcaataaagtgttcggctattatattgaagtcacaaaagcaaaccttcatctgcttgaggacgggcggtatgagcggaagcagaccctcacaaacgccgaacggtacattacgccggaattgaaggaaaaagaagcgcttattttagaagcggaaaacaacatctgcgagctggaatatgagctttttgccggtctgcgtgaaaaggtgaaacaatttattccgcgtctgcagcgtcttgccaaacaaatgagtgagctggatgcgctgcaatgctttgctacgatcagtgaaaacaggcattacacaaagcccgtcttttctgataatgaagtaaaagtcattgaagggagacaccccgtcgttgaaaaggtgatggacagtcaagaatacgtgccgaacaactgcctgatgggcgattcgcgggaaatgctccttattacgggtccgaatatgtcaggtaaaagcacgtacatgagacagatcgcacttctatcgatcatggcccaaatcggctgttttgtgcccgcaaaagaagcggttctgccgatttttgatcaaatcttcacgagaatcggggcggcggatgatttgatttccggacaaagcacctttatggtggaaatgctggaagcgaaaaacgcgattgtgaacgccacaaaagacagcctgatcctgtttgatgaaatcggccgcgggacatcaacgtacgacggaatggcgctggcacaggcgattattgaatatgttcatgatcatatcggcgctaaaacactattcagcacgcattatcatgagctgacggtgcttgaagataagcttcctcagctgaaaaacgttcatgtgcgcgcagaggaatataacggaacggtcgtgtttctccatcaaatcaaagaaggagccgcagataaaagttacggcattcatgtcgcccagcttgcggagctcccggacgatctgatcagccgcgcgcaggagattttgaaacagcttgagcagacgggagataaaccggagcttccggcggcacctgagaaaaagcccgccgtcaaagaagaaccggcacagctgtccttttttgctgacggtgaaaaagaacagaaggcaccggctgtttctaataaagaaaaacaagtgcttgaagcttttaagtcaatcaatattctcgatatgacgccgcttgaggcgatgaatgaaatgtacaagctgcaaaaaaaattaaaatagaaagaggtgacggacttggcaaaagtcatccagctgtcagatgaactttcgaataaaatagcggccggcgaggtggtcgaacggcctgcctcagtcgttaaagaattggtggaaaacgccatcgacgcaaacagcacagtcattgaaatcgacatagaggaagcggggctttcgtcgattcgggtgctcgataacggcgaagggatggaaaccgatgattgcaagcgggctttccgccgccacgcgaccagcaaaatcaaagatgaaaacgacctgttccgggtgagaacactcggtttccgcggagaagctttgccaagtatcgcgtctgtttctcatctggaaatcaaaacgagcatcggcgagggggcgggaacccatctcattcttcagggcgggaatatcatttctgaacagaaatcctccagcagaaaaggaacggagattatcgttaccaacctgtttttcaatacgcccgccagattgaaatatatgaaaaccgtgcatacggagctcggcaatattacggatgttgtcaaccggattgctcttgcgcatccggaagtatccatccgtctccgccatcaggggaaaaatctgttgcagacaaacggtaacggggacgtgcgccatgtgctggccgcaatttacgggacggcggttgcgaaaaaaatgataccgctccatgtcagctcgcttgattttgaagtcaagggctacatcgcgcttccagaaatcacgcgtgcatccagaaactatatgtcatctgtcattaacggcagatacattaagaatttcccgcttgtaaaagcggtgcatgagggctatcacacacttctgccgatcggccgccatccgattacgtttatcgaaattacgatggacccgattttggtcgatgtcaatgtccatccgtcgaagcttgaagtccgcctcagcaaagagacggagctgcatgagctgatccgtgacgggataaaggaagtgtttcaaaagcagcggcttattccgagcgcccagctcccgaaaaaaacagcgccggcaccggccaaaaacgaacagcaatttatgacattcgaggaaagcgcgcctgagcggaaacttcctgaaaaaacgccggagccgtcttactcaccgatgaagctgagttcggtcgtaaaagagccggagccggtcatagaagaagagtccctgccggatgaagcaggtcacggagtgccgccggagctcggcatgccggtaacggaagcgcctgtttccgatattccggagcctgaagaggaggctgactctgaagaaatacgggaagaaagagttccggtgatgtatccgatcggccaaatgcacgggacgtatattttagcccaaaacgaaaacggcttgtatatcattgaccagcatgcggcgcaagaacggattaaatacgaatatttccgggagaaagtcgggcaggtcgagcctgaagtgcaggatatgatcgtgccgctcacctttcattatgcggcaaatgaagcgctgatcattgaccagcatcagcatgagcttgaaagcgtcggagtatttttagaagcattcggcacgaacagctacatcgtccgctgccatccggcctggtttccaaaaggggaagaagctgaactgattgaagaaatcattcagcaggtgcttgacgccaaacagatcgatattaaaaaactcagggaggaagcggccattatgatgagctgcaaaggctcaatcaaagcgaaccgccatttgagaaacgacgaaatcaaagcgctcttggacgacctgcgccgaacgacagacccgttcacatgcccgcacggccggccgatcattatccaccacagtacgtatgaaatggagaagatgtttaagcgtgtgatgtaataacaacgtttatgtgagactaaactgttatttacccacaagcagccttactagtttgaatgacccagcctttcagagataacttttgagttctggcataattgttgcatggtataccgtaaatcatgaagataatttgtttaacatccagttatttgggaaggatccctgaagtacaagatgaatactctgtatgcgggtacctgcttttacaaagtcacagggaagagatggggaagaatttaaataaaattggaatttggcgggttatactatccgcaagtcagtcaagggggactagtgattagcccccttacatttagttcttcctgcggtattttctatttttgatcaaactgaaaaccactaagagaaccacaccgacagcaacaatataaaatgaaatttccgctgcggcggtgttaatattcttaaggacaaggataagccctattaaaattataggaatgatgtaagttagaattcttatagctttcgggctcggttcagcattacttttatcttccatagttacctccgatcttaaacactttagaaaataatcactttaaagcttaacacaggataaatttgttaaacaccaacaatagccccatttaaaggaaaagcataagagttttagtaacccacaaagttgctgcctggttaccagttacttttagagcatccgcatagcacgcatcttcaactgcaccagtaaaattgtcaatgatattaagaattatttcaaaaccgccgattccacccatagcagctttaactttagtaggtattgcgtcccgagctgctctcagtgcttttatagctcaggacaaatcaccttgaacagtaaactccgacccatatcacatagtctatttgtctaaatcttaatatttactttttacacagtaaaaagataactttatttagccctaacaaaaacatctgagctccttgtcaataatcaaatataaatcgtcttcaactgacgtcttttttcatgcgcgacgctttcgtgaattgttgcagctagactggtttttgaacggttttctcgcaaaaaaaaagagtgtaaattaagctgtacttttctcagttcaattatgttaatgtcaacataacgttgaattcggtgtaagaactaaggtattctgatatatttcgagagcccgtgtggtttagtttatctgaagaaaaggattgaaataataatcttaattgcgggtcatttctaaaaactgattatctcctccggccgcttctgtaattgcttctcaaaacaaaagttcaatttgttttctttttatccgaaactcatattcatccttcattttctgaataaaattccctaaagaattcatctgaattaatattctgatttccttatatatcagcatagcaatttgtaaaaaaggcccagactggtgcttttggcgggagcagaaagttttttaaactttaccggaaaatccatggaaaaacgtggtgccatctggtaaagtggttacagtcggctgggcggcggcagcagtctgcccggatcttttaaatgggaatggtgacaatggatcatacatatgaagtgcatcaaatcaaaacttatcaccagatgtggtccaactattgttatattatcgcagaccgctcaaaaaaatctgcgatagcggtggacccgtcctgggaaatcgataaaataaccgataaactgcatgaattggatgttgatttatcagctattttattaacacattcgcattatgaccatgtaaacttggcggagccgcttcagcaaatctatcattctgatatatacatgtcgtcggcggaaatcgatttctatcaattccggtgcagaaacttaatagcgcttgaagacggacaaacctttgcggccggagggtttatcatcagaagtatattgaccccgggacatacggccgggggaatgtgctatttgctatctgatcacctttttaccggtgataccgtgtttacagaagggtgcggtatatgtgaggacaggggcagctcagctgaagatatgtttcacagtatacagaggatcaaagcctctattccgccgcatgtgcgtgtgtatccggggcactccttcggggagaagccgggtcaaaaaatggagagtcttttgaaaaacaatatttactttcagattgaaaaaaaagaacatttcgtgaatttccgcaacagaaaaaatcaaaaagggctgtttcactttaagtagcgtataatttggttctatctaactagtttttcttttaggccacggaacttctgaattgaaatgatagtcattgctcgctttttggtgatgaatggctgagtaacggtagtttgcggataaaagcgccgggcaggctgaatgggacattctgcttatgtctattccaaaagccctgagtccgccttccgtcagggaaaaataggcattattcaggattccgcataggataaattaacttgacatggtatttttgtgaagttactatcaacttgaacatgcttcttaactgaatccgagaaaggatggctgagaaaatgatcacatacatattccccggacaaggttctcaaaagcagggaatgggaagctcattgtttgatgaatttaaagacttaacggagcaggctgatgaaacactcggatattccatgaaacggctttgtcttgagaatccgtattccaatcttcacaagacgcagttcacccagcctgctttatatgttgtaaacgcgttaagctatttgaaaaaaatccaagaaaatgacataaagccggattatttggccggccacagtttgggagaatataatgcgctgtttgcagcaggtgcttttgattttattaccggcctgcagcttgtccgtaaaagaggcgaattaatgagtatggccactgacggaaaaatggccgccgttatggggttaaccgcagctcaagtgtcggacgcccttcaaacgcacggattacatacgattgatattgccaatatgaattctcctcaccaagttgtcatatccggacgcaaagaagacattgaaagagccaaaagcgtattcgaaggaataaaggacgttacgatgtttcatccgttaaacgtcagcggcgcttttcactcgagatatatgagcgaagcaaaacaagagttcgaaaaatttttacagtcatttcatttttctgctatatcaattcctgtcatttctaatgtgcatgccaggccttatgagcaagacggaatccactccgttctggccgatcagatcgaccattcagtgcgatggaacgacagcatgcgctatctgctggacaaagggcggatggaatttgaagaagtcggcccgggccatgtgctgacaggacttattcaccgcatcaaaaaagaaactgaagcttcacccgccatgtagcggaacgcaagtcaaaattcttatctcacataatagtgccagccatacaacatcacgaccacttcacctgcacacaacatcaagaaaaacttacaaatcaatattttaaaaaaataaagagcaaaaaggagaacaaatgaaccagccaattgttttcatgttttctggacagggttcccaatactatcaaatggggaaagagctgtttgcacataacgccgcttttcggcagaaaatgcttgacttggacgattttgcagtcagccgtttcggttactctgtcctgaaagaggtttatcatacaggcaatcgtctgtctgatccatttgaccgccttcttttcagccatcctgccatttttatggctgagtacgcacttgcatatgctttggagcaaagaggcatacgtcccgattatgtgatcggagcaagccttggagagtatgcagcggccgctgtgtcgggtgtgctgagcgctgaggatgctttagattgcgtgctggaacaggcccgaatcattacggaaacttgccgtaacggcagcatgcttgcgatactgggtgatccggctttatatcaagatgatccgctgctcggcgaacatagtgaattggcatctgtaaactatcattctcactttgtcatctcgggagagcgggaacatatcaaaaagatcatggacgatctgagagaaaagcagattcctcatcagctattgccggtatcttacgggtttcactcagcgctggttgatcaggcggaacagccgtacaagcgctttttagctcagaaattaatccggactccgtttataccgtacatctccagtgcgaccggagaggctgagaccgatatacaagcggactttttctgggatattgtaagaaagccgattcaattccgcgaagcgcttcaattcgcagacagccgccaaaaaggattgtatatcgatgccgggccttccggaacgttggccgcatttgccaaacagattcttcccgcaggatcggctgaacgcatccgtgccattatgacgccgtttcataaagaacaaacccatttgcagcaaatagaagacagcattttatcaccgcccggaaggagactgtaagatgatcagctttgtttttccaggccaaggctcgcaaaaaatagggatgggagaggacctgttcggccgctatcctgaattaaccgcaaaggcggatcacattctcggatattccattcaggagctgtgccgggacggagaacgtctcaatcagactcaattcactcagccggcgctctatgtcgtcaatgccctcagttatttgaaaaaaacagaagaaaccggcttgaaaccggattttaccgccggacacagtttaggcgaatataacgcgttatacgcctcgggcgcttttgattttgaagaaggcctacagctggtcaaaaaaaggggcgacctgatgagccgcgcaaaaggaggcggcatggcagcggtgatcggcctgactcatgagcaggtgacggacgttttaagggagtatcacttgcatacgattgatatcgccaacatgaacactccgcagcaaattgtcatttccggatataaagaagatattgaaaaagccgcatccgtttttgaagccgtaaacggcgtaaaaatggttcaccgcttaaatgtcagcggcgcctttcattccagatacatgctggaagcgaaggaggaattttcacggtttattgaaactttccattttaagccgctgtccattccggtcatttcaaatgtgacggcaagaccttatgagcagaccgagctgaaaaagacactcaccggacaaataacgggatcggtgaactggacagacagcatccgttttttaatgggaagaaagaacatgatctttgaggaaatcggtcccggaaaagtgctgacggggctgattcaaagaattacggctgaagcggagccgataacagatgaaatcaaagtcccggctgaagctggaaaaagctcaattacggcggagtctttaggaaatgaagagtttaagcgcgattatcaattgaaatacgcctacttggccggcggcatgtaccgcggaatttcttcgaaggaaatggtcgtcaaactggccgaaaaaggaatgatgggctttttcggaacgggcggtttgaacatcgcgcacgttgaggacgccattttgtcaattcagcatgagcttcgtgacggcggttcctttggcataaatgttgtacataacatgaagcatacagattcagaagaaaaaatgattgatcttttactgaagcatggggttcagaacttggaagcatcagcatttttaacggttactcctgctttagtaaggtttcgcgctaaggggttaaaacgcggtgccggcggacaaataatagcgcgtcagcggattatcgcaaagctgtcccgtccggaagtagcggaagcatttctcagcccggcgcctgatcacattctgcagaaacttgcagccgaaaacaaaattaccgctgaagaagcaagtctgatgagagaaatacccgttgcgcatgacatctgcgtagaggctgattcaggcggccacactgacggcggagttgcttacagtctcatgccggcgatcatccgtttacgagatgacatgatgaaaaaataccgatacggcaaaaccgtccgcatcggagccgcagggggaatcggaacgcctgaggctgctatggccgcatttatgctcggcgctgattttattgtgaccggatccattaaccaatgcaccgttgaagcagcgacgagcggcctcgtaaaggatctcctgcagcagatgaatgtacaggacacggcctacgcgccggccggcgatatgtttgaatcaggcagcaaggtgcaggtattaaagaaagggctgttctttccgacccgggcctctaagctgcatgaactgtatcagcgtcaccgctcaattgaagaaattgatgaaaagacactcagacaaatagaagagaagtattttaaggcaagtgtaagcagtatttatgacaaagtgaaggctcattattcgaatgaagacatttcaaaagccgaacggaatccgaaacagaaaatggcgctcatattcaaatggtatttcaggcaaagctctgcttcggcgattaaaggagacccggatgccaaggtagacttccagattcattgcggcccggcattaggcgcctttaatcaatgggtgaaaggtacggagctggagtcctggaaaaaccgccatgccgatggtatcggccttcgtcttatggaagagacggcctcgcttttgaatcagaagttaggctcatttctgcaaacgtgttgacaagacgaaatgatagattgaaaacatggaatattcataaaagatgaaacagggaggaactgacaatgagtgaagaaagaatctttgaattgctgcagaacacaatctacgaggttttgcctgatttagaaggcgaacagctttcaaaggaagaccggttagttgatctgggggcggactcagtggaccgcgccgaaattatcacgatgatgcttgaagaattatcactgcagatcccgcgtgttgagctgacgggagtgtcaaacatcggcgaattggcggcaaagctttatgaaaaggtacaggctgtctgataaaacggtgaaaaaatcggaaactcaaaattcatattggaggcgaagttcatggcggctgccggaatagaagcgataaatgtgtttggcgggacggcataccttgatgtcatgcagctggcggagtacagaaacttagaccctgccagatttgagaatttactgatgaaagaaaaagcggtggcgcttccgtacgaagaccccgtcacattcggcgttaatgcggcaaagccgattatcgaccgattgacagaggctgaaaaagacagaatcgagctgctgattacctgctcggagtccggcatcgacttcggaaaatcactcagtacatatattcatgattatttaggcctcaaccggaactgccgtttatttgaactgaagcaggcctgttattcaggaacggcgggtttgcagatggcgcttaattttattttgtcgcagacatcccccggagcgaaggcgcttgtcgtcgcgacggatatttcccggtttttaattgccgaaggcggcgatgcgttaagcgaggattggtcttacgccgaaccgagcgccggagcgggtgccgtcgccttattgatcggtgaaaacccaatcgtatttcaggcggatgcgggcgccaacggctattacggctatgaggtgatggatacatgccgtccgatcccggacagtgaagccggtgacgccgacttgtcattgatgtcttatctcgattgctgcgaacagacatttcgcgagtacaaaaaccgtgtgccgggcgctgactataaagagacgtttcactatcttgccttccatacaccgtttggcggcatggtcaaaggagctcaccggacgatgatgcgtaagcttgcaaaagcgaaaaacgctgagatcgaacaggattttcaaaccagggtagagccggggctccgctactgccaaagagtcggaaacattatgggggcagcctctttactggctcttgcaagcacgattgatcaaggggctttcgacacttctaagcggatcggctgtttctcgtacggctccggatgctgttcagaattttacagcggcgttgtgacgcctgaaggacaaacgcggcagcattctttcaaaatagaagagcatctgaacaacagatacaggctgtccatggaagagtatgaagaactgtttaaaggcagcggtctggtgaagttcggaacccggaatgtcaaattggatatgaatatgattccgaacattttagaccatcatgccgggagccctcgtttatatttggaagaaatcacggaatttcatcggaaatacaggtggatcccgtgacctatgagacgatcaacgtccgttttcagcaaaatgtctgcttcatcacctttgatcggcctgaagccaacaatacgattaatgagcgtttagtggaggaatgcctgcacgttcttactgaatgtgaagactccgtgacctccgtagtgcttgaagggcagccggaggtattttgtttcggggcggattttgatgagatgtaccggaaaatgaggcagggaatgcagcatgcggaatcgcaggagccgctttaccgtttgtggctggcattaaaatccgggccgtacatcacaatcgcccgcgtccgcggaaaagtaaatgcgggaggtgtcggttttgccgccgcctgcgatatcgtcattgcagaggagagtgcttcgttcagtttatctgaactgttattcggactttatccagcctgcgttctgccgtttttaattcaaagaatcggatttcaaaaggctcattatatgacgatcatgacaaagcccgtgccggcacgccaggcgcttgaatggggactttgtgacgtatgcgtcccggactcagcaacagagctgagaaagcatttgctgcgtcttcgcccgctgtcgaaaaaagcagtcatccgctataaaaaatacatggattccttaaacgaccttgttcatcgttcgaaatccattgctctagccgaaaatcaagcgatgttttcagatccggataaccaatcagccattttccgttatgcagaaacggggcggcttccttgggaaacggagaacagttaggaggatatcatgccgaacgccgcagttgaactgctcgaaattgaaccggatattatccaagtgacaatgcaggataaagcccataaaaacgctttctccaaagaactgacggatggattgatggaagcattcacccgtataaaaaaatcgtcagtctataaagctgtgattttaacaggatacggccattactttgcttccggaggcacacaggaaggtctgctcaggattcagcagggcatcacgaagtttacggaagaccgcatgtattctttggcgctggaatgtgatatccccgttatttcagccatgcagggccacggaatcggaggcgggtttgtcatggggcttttcagtgattttgtcattttaagcaaagaaagcgtgtataccgcaaactttatgaaatacggtttcactcccggaatgggggctacctttatcgttccggagaagcttggggcaagcctcggccatgaaatgctgttaaacggcggccactaccgcggcggtgacctggagaaaagaggagtgccttttccggtgcttccgcggcaggaagtattagactatgcgcaggaattggcccgtgagcttgcggaaaaaccgagaaactctttaattacattgaaaaggcacttggtgacgccgtttcgcgagcagcttccggctgtcattgagaaggagttaatcatgcacgatgagacgtttcatgatgatgaagtgaaaaaacgaatcacgacgatgtacggagtataagacatacatcttacatacagatgaaatggaggcagctctatgaaaagtgatatgaaggcaagcgggttactcaagccatctgtcagctacggaaaaccattgcggctttcagcggatcagccgatgacgattcctgaagtcctgcacaaaaccgccgcggcagcgggagatcaaaagggcatcacatatatacagcctgacggcaccaaagtgtaccagacttacagcggcctgaaaaagatcgctctttcgattgtgaaagggctccgccaatcaggagtgaaggctcaggatgaagtcatattacagctcagtgacaattcccagctgattcctgcgttttggggctgtgtttttttaggagcgatcccggttccgcttgcggccgctccggcttatacagaaatgaacagcgggacgcaaaaactgaaagacgcctggacgcttttgaatcagccgtatgtcatcacaagccgtgaagtgctgccggagatgactgaatgggcggaggagcaggagctttccgggttttgcgctttggcggcagaagatctcagtgcgcatgaaatggatacggactgtcatcatccccgtccggaagatttggcgatgctgcttttgacctcgggaagcacgggcacgccgaaagccgtgatgctcagccatgaaaacatcgtctgcatggtcaaaggaaatattcagatgcagggctatacaagtgaggatgtcacgtttaactggatgccttttgaccatgtcggcggcatcggaatgcttcatctgcgtgatgtttatctcggatgtgaggaaatcaacataccgagcgaatccattttgatggatcctttaaaatggctcgacctgattgatcattaccgcgcttcggtcacgtgggcccccaattttgcctttgggctgcttgccgatttcgcagaagagattcaaacacggaaatgggacttatcttccatgcgttatatgctgaacggcggggaggccgcggtggcgaaagtcggacgcagaattatggagcttttagagccgcacggtctgccggctaatgccatccgtcccgcatggggaatgtccgaaacgtcttcgggcgtaattttctcagatgagtttacactggaaaacacgagtgacgacgatcgtttcgtcgagatcggtctgccgatcccggggtttaatatgagaattacggatgaccgcaatcaagtggtggaagaaggagaaatcggccgctttcaagtgtccggtctgactgtaacgagcggatattatgagcgcccggacttaaacgagagtgtctttacagaagacggctggtttgaaacgggagatctcggatttctgcgtgaaggccgcctgacgataacggggcgcacgaaagatgccatcattatcaacggtgtgaattattacagccacgccattgaatcagccgttgaggaattgccggaaattgaaacgtcatatacagcggcatgcgccgtccggccgaatcaaagcacgacagatgagctggcgattttctttgtgacgtctgttccattggatgagaaccgcatgacgaagcttattcatcacattcaccagcacgtgacacagagaatcggcgttacccctgattatctgcttccggtcgcaaaagaagacattcctaagacggcaatcgggaaaatccagcgcactcagctgaaacattcattcgaacaagggcaatttgattcattacataataacagacaagaaggcggcaattcagccccggcttctgcagagaaagaaattgaacgggattttatccgttttctgaaagaggaactttccatcgcggatgagcttgttgatccaaatacaccgtttcaaagccttggcgttaactccatcaagatgatgaaactcgccagatcaattgaaaaaacgtatcacatccggctgacggcaagagagctgcacaaaaacccgacgattggcgctttagcggcttatactgctgaaaaagcggcaaacatgtcagcggagcatcattcccaaaaagccgaaccgccggcagaacgggagagacggcaaacggcgccagcgctttcagaagtccaaaaagggctgtggacattgcagaaaatgtcgcctgaaacgactgcataccatgtcccgctctgtttccgattcacaaccggaatcgacaaagagaaactgaaacaggcgtttcagctcgtattaaagcagcatccgatgctcaaaagcgccgtgaatgaaacagacggcgggttttatttcatagaagcggcagatccttttgtattctcggaagaagatatttctgacgtcaatgaatcacaaatacccgctctgatacggaaaaaagttaaagagccgtttgtcaaagaaggcgggcctttgctgcgcgtgcggctgctttcaaaatccgcctcggaacattatcttttgacggtcattcaccacatcgtgtttgacggtttttcatccattacatttattcacagtctgctggatcattatcaggcgctgctggagggaaaagaagagtttgcggccgccgctcccggcattcattccgatttcgcggcttgggaaaagcggtatttagcgggtgaagaaagcaaagctgcccgcgcttactggatgaaacagctcgggggcgatctgcctgaccttcagcttccgccgatgcgcacgggcagcagcgttccggagtttacagaagatacgctgacacgccgtcttcccgaacggctgctgaataatctaacggcgtttgccgcatcccgttcgattcatttgtctaccgttatgctgagctgctatatggtgcttttaagcaaatatacagataaggaagatattgtgacaggcatgcctgcgatggtcagacctgaagaacgctttgacggagtggtcggccatttcctcaacatgcttcctatacggagcagagccggacgaaaagaaacatttgctgactttgttcaaaaggtgcaggatgccgttctggacggactggatcactccttttatccgtttccgaaaatggtgcgtgatgtgcatgcgaaacccctgcagaacggttcgcctgttttcagcaatgcctttttctatcagaactttctgcagtattcaagctatcaatcgatgctggatgaatacaaggaattctcctgtgagtttgtaaaagacattcatcaggagggggaatatgatcttgtatttgaaatgtgggaagaagcatcaggcatggatcttacgattaaatacagcaccgaattattcgacgaagcaggggcggccagacttttcagccaatttgtacaggccgctgaagctttgacggcgaatccggatatgccgcttgagaacgtttctctcatgacaaaaagagaggagcacatgattcttaagacttggaatgagacaagccgtgaatatccggatgcctgcttccatgaattattcgaacgtcaggcggcagaaacgccggacgcttgtgcggtcgtgtatgaacagcaaaagctgacgtaccgtgagcttgatgaaaaaagcacgaagctggcgctctatttgcaggcgcacggtgcaggccctgatgatctcatcggcatttatacagaccgttcattgcatatggctgtcggccttctcggcattttaaaagccgggggagcgtatgtgccgcttgatccttcttatcccgctgacagattggaatatatgatcgccgacagcaggatttcaatgtgtctgacgacagctgatttagagcactccttgaactggggaggcgtgcagacaactgccattgaccgcgattggtctcgtattgaaagtacagccgcggaaagaacgtcgctgaagcggttagtgacacctgacgatctggcgtacgtcatttacacgtcgggcagcacgggcaaaccgaagggcgtgatgattccgcaccgggcgctgaccaatttcttaatctcgatggcgaatgaaccggggcttacgtccgaagacaaactgcttgccgtcacgacatattgctttgatatcgcggcactggagctttacctccctttaatcaaaggagcagagtgcaacatctgtaagacagaattcacaaaagacgcacggaagctgaaagagctgattcaagagtacaaaccgacgatcatgcaggcgacgccgtttacgtggaaaatgctctttcattccggatggtcaaatgaagaaaaagtgaaaatcctttgcggcggagaggcgcttagcgaacaattgaagcagcagtttctcgatacgaaaagtgaggcttggaatatgttcgggccgacagagacgacaatctggtccgcggtgcagcgtataacggaaaatgagagcgcgcttacgatcgggcgcccgatcgccaatacccgtgtgtatattatggattccgctctcaaccctgttttagaagggatgccgggagaactttgtattgcgggagacggattggcaagagggtatttcaacaagcctgagctgacagataacgttttcgtcagccaccggctcgaattgggatcaaagctttataaaacaggcgatatggcgcgttttcttcccggcggccgcattgaatacatgggacggatggacacccaagtcaaaatccgcggctaccggattgaacccggagatattgagagccggctgaatgcctatccggccgtacaggaaagcgtagtggttgtgaacaatcactccggaaatgaaaaactttgcgcattttatatcctgaaaaacggagagccgcttccgtctgcaaaggaattgcgcaatcatttgaaacaagcgctgccggcctatatgacgccagcttcgtttatccgtcttgaagagctgccgctcacaccgaacggaaaagttgaccgcaagcttcttgctgcccgcgatctgacggaaaagcagccggacacacaaacattttcatcatctcatatccagcaggcggtgctggcgatttggcaggatgtattgaaaagcaaagatatagagcttgatgaccgcttttttgatgcggggggagattcgcttcttgccgtgactgtcactgaccggatgacgcaggaactggattgtgaattcagtgtaacggagctgtttgaatacgcgacggtaaaagacatcagccggtacatcacagaacaaaaactgaaagaaaccgttttggctcctgtgccgcaaaagaaagtgaatacagaagaccgggaacacccagcgggagaaattcccgattattatgaggacagtgtcgcggttatcggtatatcctgtgagtttccgggagcaaaagatcattatgaattttggaataacatcaaagaaggcaaagaaagcatcaacttcttttcaaaagaggagctccgccgatccggtgtttctgaagaactggctgatcatcccggcttcgttccggctaaatcagttttagaggggaaagaaatgtttgatcccggtttcttcggcttttcaccgaaagatgcggaatatatggaccctcagctgagaatgcttttgctccattcatggaaggcaatcgaggatgcgggatatatctcaaaagaaattccggaaacaagcgtgtatatgtctgcaagcacgaactcttaccgcagcctgctgccggaggagacgacagcacagctggaaacgccggatggctacgtatcatgggtgcttgcccaaagcggcacgattccgacgatgatttctcataaactcgggttgaaagggccgagctattttgtccatgccaactgctcatcttcgttaatcggcctgcattcggcttttcaaagcctgcattccggcgaagccaagtatgcccttgtcggcggtgcgacccttcatacggaatcaagtgccggatatgttcatcagccggggctgaatttttcaagcgacgggcatattaaagcgtttgacgcggctgctgatggaatgatcggcggtgaaggagccggcgccgtgctcttgaaaaaagcgtcggatgccgttaaggacggcgaccatatttatgcgctgctgcgcggaatcggcgtcaataacgacggagcggataaggtcggattttatgcgccgagcgtcaaaggacaggctgaggtcattcagaaggtcattgatcagaccggcatccatcctgaaacgatcgcgtacgtcgaagctcacggcacaggaacaaaactcggcgacccgatcgaactgtccgcacttcaatcggtgtacggccgatatacagataaaaaacaatactgcggcatcggttcagtcaaaacaaatctcgggcatttggatacagcggccggaatggcgggctgcatcaaggttgtcatgagcttatatcatcaggaaatcgcgccgagcatcaattacaaagagccgaacccgaatcttcatttagaagactctccgttttacgtagcgggagaaaagaaagagttaacccgtgagaacagagcgcaccgcatggctttaagctctttcggtcttggcggaacaaacacacacgcgatttttgaacaatatccggatgcatccgaagcagcagacgctgccggtccgttcatcattccgttgtctgccagaaaaaaagatcgtctgaaggagtacgcaaaacagctgctggcttttctggaaagaaaaacggacgccggcctcgctgatcttgcctacacgttccaagtcggaagggaagcgatggaagagcgcgcggcctttatcacaagcggcactgcggagctcaagcggcagcttgccgattttatcaatgataagccggctgtaacaggctgctttagaggagaaaaacagcaggcaaaagatattgcctggctttctgatgatgatgacagcgctgaactcattgagaaatggcttgcgaaaggaaaaggaacgaagctctgtgaaatgtggagtaaaggtgtcgccattaattggcacaagctttacaaagacaagcatccgaaacggatcagcgtgccggtctacccgtttgcaaaggagccgtactggccgaaaaaagcagaaaagaaaacatctgccgcacacaccggagtctcagttttacacccgcttgtgcagcaaaatacgtcagatttggccgttcagcggttcagctcacggtttacaggctcagaatttttcctgaaggatcatgtggtcagggaaaaagcggtgctgccgggagcggcatatttggaaatgtcttatgaagcggtaaaacgggcgcttggcggcttattaaaagaccaagacagaataacgctccatcataccgtctggatgaaaccgatcgtcgttcacgaacaagagcgccaagtccatatcgcgctgtttcctgaagaggacggcatcatctcatatgacatttacagcgtaaacgctgacgatgaagaagtgctgcacagccaaggacgggctgaaatcataaaggctgaacgagagcctgaggccgacctttctgccatacaaaacagatgcacagcggacattcttgatccggcggccttttatcgggaaggccggagcagggggatgttccacggaaaagccttccaaggcattaagtccgcctttatcggcgagaaagaagtgctttcggatatacagcttccggattctgtttctcatacgaacggacaatttacgcttcatccgagcatcattgattcggctattcagacggcgacgatctgcattatgcaggagttttccggacaaaagctgattctgccgtttgcgctggaataccttgaagtcatcaaaccatgcacaccgactatgcgggcgcatgcacgcttcagcgaaggatatcaaaccggtgattccgtgcagaaagccgacattgacctgttcgacgaaacaggagcgctttgcgtgaaggtgagaggattctctacgagagtgcttgaaggcgatgcagaatcggctcagcggccatcaggctcggaaaaggtcttgtttgcaccggtttggaaagaagccgccgcatccgagaaagcttctgtccatgctgatgagcatttgatcatactttgtgaagatgcctgccgtataaaagatgaagcggcatccggcctgaaagacgccgagctgctgattgcagaaggtgagggagaaacagccgctgaacgcttccaaggctacgcgcagacaatcgccgaacacatccggcggatcatcagcgaaaaaaggcagggccgcattctgattcagactgttatttcagcagacggcagccagcaattgtttgcggggttaacaggtttgttaaaaacagccgagctggaatacggaaaacttgactgtcagctcatcgagatggaatcaatcggcgaaatgccggctgccgctcaaaaactgaaaaacgacagccatcggccgcatgataaacatatccgttatacaggagaaaaacggtatgtgaaggcttgggaagaaatgcatcctgcaggtggcggcgccgtctggaaggacgaaggcgtatatctgattaccggaggcgcaggaagcctggggttgatgttcgcaaaagaaatcgctggtcgcgtaaaacacccgaaaatcattctgaccggccgctcaaatctggcagaagccaaacagcgtgagcttgctatgcttcaggactcaggcgcaaatgtcgtctacaaaaagctgaatgcggcagaccggcgggaaaatgaagcgctgataaaagagattacggcggaattcggggagcttaacggaattattcacgcagcgggcgtgatacaagaccgtttcctgctgcaaaaaacgaaggaagagttctgggaagtgcttgatccgaaagtgatcggcaccgcttatttagatgaagccagcaaagactgcaaccttgactttttcgtattgttctccagtgtttccggcgttctcggcaatgtcgggcaggctgattatgccgccggcaacgcgtttatggatgcatacgccgcttacaggcaatcccttacggagaatggcctgcggcacggaaaaacgatcgcctttaactggacgctgtggaaagatggcggtatgcaggcgggagacgagacggaaagaatgatgaaaaaagctttcggcatggttccgcttcaaaaggcgtcaggcctggctgcattttatgaaggaatggctcaggaaaagccgcagcttttagcagctgaaggacacgcagcaaaattaaaacagtcgttcctgtccgtttctgaaactgaaaagccgcaggtggagaaaatagaacctgtatccgccgtttcgggagacaaatggcacggtgcgcttatcagattggtcagttcaattttaaaagtcggccaagacgagattgatattgatacggaactgagtgaatacggttttgattccgtatcctttaccgtctttacgaatcaattaaatgaagcgtatcagctggagctggcaccgacgatcttcttcgagcacgggacgatccgcagtttagcagagtatttgtcggatgaaacagagagaggtcttccttttcagccggaagaaaaacacgatgcagaagaatctcttcaagcgcttcacaccgctttgacagccatggtaagcagcattttaaaagttgaccgtgaggacattgatacagatacggaactgagtgaatacggttttgattccgtatcctttaccgtctttacgaatcaattaaatgaagcgtatcagctggagctggcgccgacgattttctttgagtacggaacgatcagtaatctcgccggatatttggcaaaagagcatccgggccgtttcggcgaaaagaagaaggagtctccgaaaaaagagcagccaaaagcccaaaaaccgaaaacgcatcggaaaaagcgtttcgcaacggtgatgaacgctagggcagcgacacaagagccgcgccgcttgaacccggttgccattgtcggaatcagcggccgattcccgggcgcgaaggatatagaggaattttggcgcaatctgaaagaaggaaaagattctatcacaaccattccgaaagaacgctgggattggcaagcgtttgatggcgacccgaatcttgaaaggaacaaaacgaatattaagtggggcggctttatcgacggaatagctgaatttgatccgctgttctttgggatttcaccgcgggaagcccaatatttagatccgcagcagcggctgttattgacttatgcatggcgggcgatagaagatgcgggctgtaagccggaaagcctttccggcacaaatacgggtgtctttatcggcaccggaaataccggttataaagatttgttcacaagggcaggtcttgcgccggaaggacatgcggcgacaggcagcatgattccttccatcggtccgaaccgtttaagctatttgttaaatcttcacgggccgagcgagccggttgaaacggcatgttcaagctcgcttgttgcgattcaccgggcggtatccgctatagaaaacggagaatgcgacatggcgatcgccgggggaatcaacacgattctgacggaagaagcgcatatcagctacagcaaagcaggcatgctcagcaaagacggaaaatgcaaaaccttctccaaagatgccaacgggtatgtcaggggagaaggcgcgggaattctgatgctgaagaaactgacagatgcagaacgtgacggcaatccgatttacggcgtgatccgcggtacggctgaaaaccacggcggccgggcgaatacgttaacctcgccgaatccgaaactgcaggctgatttattggtgaaagcatatcggaaagcgggagtggacccgagcaccgtcacgtatattgaagcgcacggtacaggaacggaattgggcgacccgattgaaataaacggtttgaaagcggcgtttcacgagctggcgaaaacaaatcaagagcctgaagtctccgatcaccgctgcggcatcggttcggtcaagagcaatatcggccatttagagcttgccgcgggagtatcaggcgtcatgaaagtgcttttgcaaatgaagcacaaaacgctggtgaaaagcctgcattgcgagacgatcaatccgtacattcagctcgatgacagtcctttctacatcgtgcgggaaaatcaggaatggacggcagcgaaagatagaaacggaaatgccattccgcgccgggccggggtcagctcatttggcatcggcggggtcaacgcccatatcgtcattgaagagtatgtcccgaaagcagccgctctgcctgagcacagcccggaaaatccggcaatcatccttttgtccgccaaatcaaaagaaaaactgttcgaacaggcgcagcagctgcaaaaagcgatccgtcaaacgccgtatacagatcaagacttggcgggcgtcgcttatacgctgcaaaccggaagggacgaaatggaagagcgcctggccattcttgcagcgacgatggcggaattggaaacaaagctggaagcatttacgaaaaatgagaaaaacatcgccgggctgtataccggccagtctcaccgcaataaagatacgtttgccttgttcacggcagatgaagatatggacatcgtcattgacgcctggattaaaaaaggaaaattcgccaagctggcagaggtatgggtgaaaggcggcgtgttgaattggaaccggctgtatgaaaagggtacgccgcgtttactcagtcttccgtcttatccgttcgcaaaagacacgtattgggtgcctgagaatcctgacaaaaataaggtccatacagaggaacggatgaaacgtattctgacaaaacaatgggaaccgagcccgctcgaactgcgtgaaccgtgcccacgttccgttgcgattttgacaggcggggacacgatcaatctcgcagaagagatcgcagcgcatatgccgaatcaccgtattatcacaacatcagaccttacaggtgaatatgactggcaggcgtttggcggagtcatcgaccttctcggtgcagcgaaagaagaagcttctggagatatgaccggtatcaaatggcttcagcaattgattgagcatgggcataaagaagggataacactgctttgtgtcacgaaagaccttgagtcaatggggaaaaaggccaatcaaataacgggagcaaaacgggccgggctgtacagaatgctggcatgcgagtacagtcatctgtcttcaaggcatctcgatcttgaaggagcgctttcggatgacaaactggcgaagcagattgccgatgagtttcatgcccgtactgatgacgcggaagtttgccggagggacggcttgcgctaccgcgccgtattgagcggttcagaaaatatgaatacgcaaggcgagagaattgattttccggaccaccatgtgcttctgatcaccggagggacgagagggatcggtcttttatgcgcacgccattttgccgaacattacggagtgaaaaaactggtgcttacaggccgtgagacccttccgccgcgaagtgagtggacgggcggactgaatggggtgacggcttctgtaaaagcgaaaattgaagctgttctcgacttggagtccaaaggtgtacaagtgaaggtattgtcagtcccgttagctgatgaagccgggctgagacaggaattgagtcagatcaaacagacgctcggacctatcggcggcgtgattcactgcgcgggtgtgaccgataaagagacgctcgcattcatcagaaaaaccgatgaagacatacagcgcgtgctcgagccgaaagtagaggggcttcaggcgttatacagtgtgctcagcgaagagccgctgaagtttttcgtcttgttctcttctgtgtcagctgcgataccggcgctttcggcaggacaggccgactatgccatggccaatgcgtatatggactattttgcagactcatacaaagagcagctgccgatcgtaagcattcagtggccgaactggaaagaaaccggaatgggcgaagtaacgaacaaagcttataaagagagcgggctatacagcatcacgaatgcagaaggattacagctccttgacggcatacttcttgaatcagcaaggggcccggtgctgccggccgttctgaatcctaagctgtggaagccggagcgattcctgcggcggagcaggcaggatcagccaatgagcccggctatggtaaaatcggcggaaaaaaccgctgataccgccgcagacaacgctcaattaacaaggaaaacagaagaatggctgaaagaattattttctgaagagctgcggattgaccaggatcagcttgagacagacgtattattccaagattacggagtggactccattatccttgctcagcttctgcagcggatcaatcggaatctctcggcatcgcttgacccgtccattctgtatgaatatccgacgattcaatctttcgcaaaatggcttctcgaagggtatacagaagttttgtcagaacggtttgatttggcggcggctgagcctgttatgaagaagccggctgagccggtaattgtaacacaagccgttaaggtgcaagaagaggcggccgaaaaacagattcaccgggaagatatcgcggtcgtcggcatgtcctgccggtttccgggggcggcttccttagaggcgtactggtcgcttttggctgaaggccgttcggctatcggtcctgttccggctgagcgatggggggtgaagacgccttattacgcgggaatgcttgatggaattcatcaatttgatccggacttctttttactggctgaagaagatgtaaaggcaatggaccctcaagctttggccgctctggaagaatgtcttaacctgtggtatcacgcgggctatacgccggatgagataaagggagaagcaataggtgtgtacctcgggggacgcagccgtcacagaccgggtgaagagaaactgctggatgcgaaaaacccgatcgtcgcgctgggccagaattatttggccgccaatctctctcaatattttgatatgcgcggcccgagtgttgtcctcgatacggcttgttcttctgctttagtcggaatgaatatggccgtgcaggctcttgtaacaggagaaataaaagcggccgtcgtcggcggtgtgagcctgtttgaatcagaagaaacccataaattatttgaacagcgcggcatattaagtaaagcgcagtcgttccatgtatttgacgaacgcgccgatggagtcgtgctgggcgagggtgtcggaatggttcttttaaaaaccgtgtctcaggccattgcagacggagattctatttatgccgtagtgaaggcggcatccgtcaataatgacggaagaacggcaggcccggctacgccgagtctggaagcgcaaaaatccgtcatgaagacggctcttgaaaaaagcggaaaacagccggaagacattactcatattgaagcgaacggttcaggcacggtcgtgacggatctgttagaactgaaggccattcaatccgtctaccgttcaaaagacgccggcccgctcggaatcggatctgtgaaaccgaacatcgggcacccgctttgcgcggaaggaattgcaagtttcataaaggttgttctcatgctgaaagaaaagagctttatcccgtttttatcaggtgagcatgaaaacacacattttgatagagaaaaggccaatattcagttcagccgcactctggcagactggccgtcaccaatgccggcggcaggaattaactgctttgccgacggtggaacaaatgcccacgtcattgtggaagcgtggcagggagacgaagggcgccgaatcaagcgccaccctttaacaccgcctgcattaaataagcggctgatttcgccggacagcaaagaagaaacgaacgaaaaagctgcggcaaacatctgggatacctatgaagtggaggtttaacgtgaagaacttcaataagcaaatcactttatcgctgaaaaatccgtttattttacatcatgacgtttacggacaaaaagtccttccgggattggcttatattgatatgttttatcagatttttaaagagcgcggctattcatacgacgggcttcagctgcgccatttatccatatatcagccgcttatcgcgaaagaagacagcgccgtcaagcttacggttgaatgtacaaaggtaaaagaagggcgctggaaacttaccgcaaaaggggctgaggtcagcggcggacgagtccagccggaagaacgtatttacgtcaaagcggaaatgcacgagacggcacccgcagttttcagtgacacgcttgatcttgactctgtcaaacgcgaggcggaacgcaccatcgatttaaatgagctgtatgcccaatgcagaagccaggaattggttcacagcggatatatgaaagcggaaggagaagtgtttgaggagcgggacggcgtcacctttgatgtatcgctcggaaaagacgcgatgggacaggccgaagggtttttgttccatccgactcttcttgacggaagcggcgtcggcgcaaacctattgatctcctcgctgttaaatggggaaaagaggctgtttctgcctcttttctacgaatcttttacagcttccgaacctttgcaggccggctgcatcacgagaatcaaacgttcgtcgcttcggcaggaaaaagagctcatttacattacactggagttttttaacacatccggccgaaaagtagccgagctgaaagatttcacaagcaagctcgtgcgggatgccgagctgatcaatacagaccgaaagactgctgagaagcctcctgaaaaagtcggtttaccggaagttgcggcatcgcttgaaggcggacacccgcatgaggaagcagaacggtatgtcatgaatctgatggctgaaaaaatcggcaagccgcttgaacagattgattctcaagtcggctactatgaaatggggctgacatcgtccggactgcttgacgtcgtcgaaacgatcagtgaaaaaatcggcgaaaccctttctccgactttgctgtttgaatatacgacggcatcagagctggcggctttcctgacagagcagtacggaagccatttcagcgcgtctcctgcaaaaatagagaagcaggttgagaagcaaacagaaagaagacggaaaagcagtgttccgcaagatgaagatatcgcgattatcggcatggccggccgctatccgcaggccgaaaatattcatgaattctgggaaaacctgaaagaaggaaaaaactgtgtcaccgaaattccggagtctcgctgggactggcgccggtttgaaaatgtaaagtcgccttccggaaagagcatttcaaaatggggcggatttattgatgatccggattgctttgatccccaatttttccggattacgccgcgggaagctgaaacaatggaccctcaggaacggctgtttttacaaacatgctgggaaacgattgaggatgccggatatacgccgaagtcgctcgcagaggcgcgcggacggaataagaggcagcgcgtcggtgtcttcgcaggggtgatgcataaggattatacgttggtcggggctgaagcttcttctgaagatcatgtattcccgctttctcttaattatgcgcaaatcgcaaacagagtttcatatttttgcaattttcacgggccgagcatggctgtcgatacggtctgttcatcctcgctgactgcggttcaccttgctgcggaaagcattcggcgcggggaatgtgaatcggcggttgccggaggggtcaacttgtcgctgcatccgaataaatatctgacatacggtttatgggacatgttttcaacagacggggtttgtcatacattcgggaaagacggagacggctatgtaccggctgaaggaatcggtgccgttttattaaaaccgctgcgagaggcggtaaaagacggagaccggatttatgcggtgataaagggcagtgccgtcaaccacgtggggacagtgagcggaatttccgtgccgagtcctgtcgcgcaggccgatttgattgaagaatgcctggacaaagcgggcatcgatccgcgcacggtcagttatattgaggcgcacgggacgggaacttctctcggcgatccgattgaggttcaaggccttgtcaaggcgttccgccagtacacacaggacaaacagttctgttcgatcggatcagtgaagtccaatatcggccatgcggaatcggcggcgggcatcagcggcttaagcaaggttgccctgcagcttcaccataaaactttggtgccgtctcttcattccgaggagctgaatccgtatttagattttgaacaatcaccgttttacgtccagcatcataccgaagcatggcagcagccatcagtgacggaaaacggaaacgagaccgtatatccccggcgtgcgggcatcagttctttcggggcgacaggttcaaacgtgcatctcattctggaggaatttatccctgaagaatcacggagaacagcgtatgaaccggcagaagaacagactttcattttcccggtttccgcccggaatgaagaacggctaaaagagtatgttgcgaagctgtcttcatttatttatcccggcctgccgcttgaggatgcggcgtatacacttcagatcggccgtgaacagatggaggagcgggttgcgttcaccgctcagaatatgacacagctcaaagagcggctggaaggctttctggcgggtaaaacggtcagcggatgctggcggaaccgagccgataaaagcaatcaggcagagcttgctccggacttgatacataaatggctttcttccgggagtctggagatgattgccgaaaagtggaccggcggaggaacgatggattggaatctcttgtacggtgaaaacaaaccgaatcggatcagcctgccgacatatccgtttgaaaaaatccggtattgggtgccgaaggcggagaaaagagaatcgctgccgcaaaaaagggcaggcatgctgcatccgctccttcatgaaaatgtatcaaacatgtcaggtgttcgtttccggtcctcttttagcggcggagaatttttcctgaaagatcacgtcgtcaaaaacgagcggacgttaccgggcgcggcttatctggaaatggtccgggcggccgttgaacacgcggcagaaacgaaggaagaaggaacagtccgtctgaaaaacgtcgtatggatacgtccgtttacagcggcggatgaatccgcagaactgtatctccgtctttatgatgaagaaaatggggagatgggcttcacggtttacggtgaatcggcttcctcggaacaagagcccgttctctatgcgcaaggaagcgcggcgtttgtccgagggggcgaaccggccaaaatcgagattgacaaattaagagagtcacgccgtctgatcacacctgacgcttgctatcaggcatacaaacagatggggattgaatacggggatgctcacaaagcggtcacggaaatctatgcaaaagacagcaaagtgctcgcgaagctctcactcccgtcatctatttctcatacaaaagatcagtttgtcctccatccgagccttttggatgcggctttccacgcgacaatcgggttaatgcttgacagagacggaaatgacataaggccgatgctgccgtttgctctcgaacagattgatgtgttgaaaagctgtaaaagcgatatgtgggtttccattgcgtacagcggcgaaagcaagccagaagatgccgtgcagaagctggatattgatgtatgtgacgaacaaggcaatgtatgtgtgaaaatgactggttattccgcacgggaaattgaaacggataaaacagatacactattttttgaacacgtatgggaagagaaggccgctgtacatgaaaaagcgccgactcatttcaaagcccgtcacgtgatgatatcagaccggtttacggatcaaatgaacagcatacagacagacttcagctgtcacgtgctccgtgatcagcataagagtgaagacgaacggtttgaagcttgtgcgcttcaggcgttcgaagaagtgaagaaaattctcgcttcaaattccggcgggcgcgagctcattcagattgtcgtgcctcaagaagcggatacgcagctcctttgcggcttaacggggcttttgaaaacagcggcgcttgaaaacccgaacctgaccggccagctgattgaattggagccggacgtcaaggcagacacgctgtcccgatatgtaaaagaatgcagcgctcatcctgatgacaaacatattcgctatgaaaacggcaagcgctatacggcacaatggcaggaaacagggcttgaacagttcggcgccgaaaagccgtggaaggataaaggtgtttatctgatcacaggcggtgcgggcggactcggatttttattcgccaaagaaatcgcccgacatgcaaaagacgccgtgcttattttaacggggcgttctctgttggataaccgtaaaaaagaccagctgcaagaactgtccgatctcggcgcgcaagccgtgtacaaacaaacggacatgacggaaaaacaagaagttcaatcgctcacagcggacatctgccgacagtacggcggattaaacggtatcatacacagcgcgggaacgataaaagacaattatattctgaaaaagcacaaaggtgaaatccgtgatgtgctggcgccgaaagtctccggactggttcatcttgatgaagcggcaaaggacattgagcttgattttctgattcttttctcttccggagccggaagcgccggaagcgcgggccaggctgattatgcgatggccaatgcgttcatgaacgccttcagtgaaaaaagaaaccgtaaaaaagcccgaaatgaacgctatggacacaccctttcaatctgctggccgctttggaaagacggcggcatgacggttgatgctgaaacggaagcgatgctgacaaaagaaagcggcatggtccctatgaaaacagaaaacggcatccatgctttgtaccgcgggtgggcggcaaacacatcccaaatcatggtgacggaaggctacgccgcaaaaatccgggcgtttctgaaaaaatcagcggatgatcagccggataagggcagcgaaacggaagaaccggcaggtcttacggcaggcggagagaacatgcttgcagaaaaaacggagcatttcttgaaacatgtgctttcggaagtaacaaaacttcctgtcggcaaaattgacgccaaggcgcctatggaagattacggaattgattcgattatgattatgcatttgacgggccggctggaaaagagcttcggttcattgtcaaaaacattgtttttcgaatatcagaatatcgaatcgctggcgcagtattttatgaaagcacaccgggacacgctgctggaagtgaccgggctgaaaacagaagaaacctctgcagccaaaccggcgctgtctgaaaaagccgaaataaagcccgtttccaaacggaatgaagccaaaaaaggctttgcgcaagtccgcacagacacgcggaaaaatccagtgacggagcgtgaagatatcgcgattatcggtatatcaggacgatatccgcaagccgaaaatcttcaggaattttggaagaacttgagtgaaggcactgactgcataactgaaattccaaacgatcgctgggatcacagtctttattacgacgctgataaagataaagaaggcaagacgtacggaaaatggggaggatttttgaaagacgtggacaaatttgatccgcaattcttctctatttcgcctcgggatgcaaaattgatggacccgcaggagcggttattcctgcaatgtgtctacgaaacgatggaagatgccggttacacgcgcaaaaagctcacggaaaaatcgggtgatttgcttggcgccaatgtcggtgtttacgtaggcgtcatgtatgaggaatatcagctttacggagccgaagaacaggcgcgcggaaaatcgcttgcgctgaccggaaatccgtcatcaattgcgaacagggcttcctatgtattcggttttaacggtccgagcatggcgctggatacgatgtgctcttcttctttaacagccattcatctggcatgccaaagcttgcggaacggggaatgcgagacagcatttgccgggggcgtcaatgtatccgttcatccgaataaatatttgatgctcggccagaacagatttttatcaagcaaaggcagatgtgaaagtttcggtgaaggcggggacggttatgtgcccggtgaaggagtgggagcggtactccttaagccgctttctaaagcgaaagcggacggtgatcatatttacggcctgatcaaaggaacggccgtaaaccatgatggaaaaacaaacgggtattccgtaccgaatccgaacgcccaagccgcggtgatcaaacaggcgttaaaagacgcgggaaccgatccgagggcagtcagctacatcgaagcccacggcaccgggacttcactcggtgatccgattgaaatcacgggtctgacaaaagccttttcagaacaaacacaagataaacagttttgtgccatcggctcagcaaaatccaatatcgggcactgtgaaagcgcggcgggcatcgcgggtctgacgaaggtgctcctgcaaatgaaacataagaagctcgcaccgtcactgcattcccggacgcttaacccgaatattgattttctcgctacgccgtttatagtgcagcagacgcttgaagagtggaaaagaccggtcataaatgaaaacggaataaataaagaactgccgagaaccgcggggctttcctcattcggagccgggggcgtcaacgctcatatcgtcatcgaagaatataccgctgatgaggataaggagacggcttttgccgctcctcatccatcgatgatcgtcctttccgcgaaaaatgaacaaaggcttcaaaaacgggcggaacgtcttcttgatgcgctgcggagcgggcgttaccaagaagcggatctgagccggatcgcatatacgcttcaaatcggacgtgaaccgatggaagagcgtctcggaatgattgtcagcaatttgcgcgagcttgaagaaaagcttgacgaatttacgggcggcaaggagtcaattgaccggctctaccgcggacaagtcaaacagaataaagacacgatggcgctgtttgcggctgatgaggacatggaaaaaaccattgaggcatggcttgaaaaaggcaaagccgcaaaggtattagagctttgggtgaagggccttccgctgaattgggataagctgtatcaaatgggcagaccgcaaaaaatcagtctcccggcctacccgtttgcaaaagaccgttattggatcgacacatcagctgatgcagctgtcaaaagaccggccgaaacacagtctgcgccgatcgcaccggcggccgtcccggaaccggtcattgaagtagcaactcttcacgaggagactgccaaagaaaaaccgtcaaacatttcattgcagcctttgagcggcgcgaaaccgaaaagaaccgtacagtctgcttcccgtccggcggtatccgctgaaaaagtaagtgccgaattaacggaaaggttggcggacgtgttatatatggatgccgacgatatcgacgcagatgacacatttattgatatcggcatggattcaatcacaggtcttgaatggataaaggccgttaataaagcgtacggcacgtcccttacggtgacgaaagtatatgattatccgacaatccgccagtttgcggccttcttgcaaaaagaactcgggacagaaccgatccttgaggaagcagccgaaccgcagaaaacagaggccgtaaaaaaaccgtcaaacatactgctgcagcctttaaacgctcataagcagcatgtgatacaagcagaagcggatattctggaggcgatgtctgaaacggcagcttccgccgaaccggaagaaccgattgaagcggtgcatgacgagttatcaaaagcactggctgatgtattgtacatggagcggcatgaagtggatattgatgaggcctttattgacctcggtatggattcgattaccggtcttgaatggataaaggccgtcaataaacggtacggcacggactgtaacgtaacgaaagtgtatgattatccgacaatccgtcaatttgccgattttctgcgtacgcagccgtccgtccgcggcagaaaaaaacaggcggttcccgtacgtccaaagccgcttacacagcaagccgccccgcaggagaaaacacctgccgagccggagagattaacggttcaaaaggaacctgaaccggtgcaggccaaacgggagcctaaagacgagatagcggacgcgatagccatagttggcatgtcgggcaagtacccggatgcgccggacctaaaggcatattgggacaacttagcccgtgcgaaaaacgctatccgcgacatcccgctttcccgctgggatgtaaacaaatactatgatccggccttaaacaagaagggcaaagtatactgcagatcaatcggtatgcttgacggcattgaagagtttgatccgctgttctttaatatttctccgtctgaagcggaacttatggacccgcagcaccggatatttttacaggaaggttttaaagcctttgaagatgcgggttacagctcaaaagaattaaacggaaaaaattgcggcgtttatttggggattatgaacaatgaatacggaatgatgttaaacaaacatcagacaggaggaagcgcgacgggcaacagtttcagcatcgcggcggcccgcctgccttattatctcaatttgaaagggccggccattccgatcgatacggcatgctcttcatctctcgtcgggactcatttggcgcgtcaggcgctgttgaatcatgaaattgacatggcccttgtcggcggcgtcaccttgtatttaacgcctgaatcatacatcagcatgtgtgaagccggaatgctgtctcctgacggccaatgtaaagcatttgataacagtgcgaacggatttgtgcctggcgaaggcgcgggggcgctcgttttgaagaggctgaaagatgcggaagccgatcaagaccatatttacggagtcattatcggatctggaattaaccaagacggaaaaaccaacggcattaccgcaccaagcgcgaaaagccaaatggatttagagcgtcaagtgtatgaagcgcacaacatccaccctgagagcatcacctatgcggaaatgcacggcaccggcacaaagcaggggatccgattgaattagaagccttatcttctgtattcaaggaaaaaacggaccgcaaacaattttgcgccatcggttcggttaaatcgaatatcgggcatacgtcggcggcggcaggtgtagcaagcgtacagaaggttctgctgtcgatgaagcaccagcagcttgtgccgacccttcatttcagcacgccgaatgaacattttgatttcgatgactcgcctttatttgtcaataccgaacttaaaccttgggaaacaggcggagcaccgcggcgggcctgcgtcagctcattcggctacagcggcacaaacgctcatctcgttatcgaagagtatcagccgaaagaccggggaagccgcaagtctgatgagacaaacatttttgtgctgtcggcgaaaaaagcgccgcaggtaaaaacctatgctgagtctgtgatcgaatttgcaaaagccaatcagaatatcaatctttcggatatggcatacacgcttcagaccgggcgtgatgcgatggattaccgtcttgcggttacagccggttcgagagaagaactgatcagccgtttaaccgattttgtaaacggaaatacgggtgaagggatatatgaagcccacatcaaaacggcaaaaaaagaaatcaaagcatttgaaacggacgatgatctgaagcagcttgtcaggtcgtggttcgataagaaaaaatacgccaaaatagcggaattgtgggccaaagggcttcagacggactgggacagactctatcaaggcgaaaaaccccgcagaatcagtctgccggcttacccatttgcgaaggagccgtactggctgcctgagccgaaagccgtaccgcaggaaacagaagaccggcgcaaggctgtgcttttagaaaagcaatgggttccgtgtgagatcgattcggccggtgagaaaagcggcaggacggtcatgattctggctgatgcaagaacagcggaacttgccgaagagactgcgaagcatttcgctgactcgttcattctcccggccgctgacactgcagctagcgattggaatcacatagatggcgtaatcgatctgacgggatgcggagacgaagacccttcactggaagggatcagccggctccagactctgattgatacaagccgccggcaagcgcggccgctgacgctgctatatgtaacaaaaggcttggagccatttcagcagaaaacgattcatcttgcaggagcggcaaaaagcggcctgtacagaatgcttcaaaatgagtatcaaaacgtgacgtccagacacatggataccgatacagatacggatcagcagacgcttgccaaacagattgcagatgaattttcggcggacagcacagaaccggaagtctgccgccgaaacggacaaagataccgtgctttgttcagcgagattccaagcgggaagcgagcagaacataagccagcaccgtttcctgaagaccatgtgcttttcattaccggagggacgaggggactgggtctcttatgcgcccgccatttcacagaaaaacacggcgtgaaaaaagtagtgctgacaggcagggagccgattcctccccgtcataaacggacagccgttaatatgaggctgagagagaagatacgggcgattgaagagcttgaagcaaaaggagtgcaagtggcggtgatcagtctgaaattgtctgatcatgacgcggcggcagcggaaattgaaacgatccggcgcacgatgggaccgatcggcggcgtcattcactgtgcgggatcggttaattcagtaaatccggcgtttatcagaaagactgccgacgacatacaagaagtgcttgaaccgaaagtcgccgggcttcaaacattaagcagccttttcacaaatgatcctttgcaattttttgtcttattttcttcagtatctgcagtcgttccggcactcgcggcgggacagtcggattatgcgatggcaaatgcgtacatggattatttcgcggcggctcatcagcatcaatatccgttagtcagcattcaatggccgaactggaaggaaaccggattgggtgaaatccgcacagaaaacctgaagcagaccgggctgctgggactgtccaacgcggaaggacttgacttgctggaccgcattttatctgaaaacatccgcccgtccgttctgccggctatcgttgatcggagcgaatggcatcccgacaggctgctctgtcaagagaaaaaacaaaaagagactgaagccgtaataaacggcaaagacgcggaaaaacattcagacagagaactgcttcttgatacgaaggcatggcttgtgaaactgttttccgatgagctgaaaatcgctccggaagatctggaaacagacgaaccgtttcaggattacggggttgattcgatcattttagcgcagcttttacagcaaatgaatcaagcgctcaaagaggacttagatccgtctgttttatatgaacatccgacgattgacgcgtttgccgaatggcttgtatccaatgggcagccgctgcttgcagaaagggaggaacctgatacggaaatgttggttccggctgccgtacaaacggttcacactgagcaaaagcgtgctgctgtaactgaagacattgccgtcgtcggaatgagctgccgttttccgggagcggaatcgttagaacaatattgggacttgctgagaagcggcaggtccgcaatcggctccgtcccggcggaacgtttcggatatgcaaatcaatatgttgcgggattgattgacaatatggatcactttgattccgaattctttttcattccggaaaacgacgcgaaagcgatggaccctcaggcgttggcggtgctggaagagagcttgaaactttggtgccatgccggctatacccgtgaagaaatcaagggcatagaagccggtgtgtatatcggaggccgcagccagcatcagcctgatcctgaaagtcttgcgaatacccgcaacccgattgttgcgggcgggcagaattatttagcggcaaacgtttcgcaattttttgatctgcgcgggccgagtatcgtgcttgatacggcttgttcatcagctttgacaggaatgaacatggccgttcaggcactgagaagcggcgatatcaaagcggcggtagttggcggcgtcagcctgctgaacacggatgcggcgcaccggatgttccaagagcgcgggctgttaaacgagaaaccggcatttcacgtatttgacaagcgttcaggcggagtggtcctcggtgaaggcgtcggcatggtgctgttaaaaacagtaagccaggcgcaaaaagacggcgatacgatacacgcggtcattaaggctgccgccatgaacaatgacggcagaacggcaggcccgtcagccccgaatatgcaggcgcaaaaagacgttatgcaaagcgcgcttctcaaaagcggcaaaaagccggaagacatcacttatatcgaagcaaacggatcgggttccgcggtgactgatttgcttgagctgaaggcgattcaatccgtataccgctcaggtcagcatgttccgctcggcatcgggtcaatcaagccgaacatcgggcatccgctttgcgcagaaggcattgcaagcttcattaaagtcgtattaatgctgaagcataaacaaacggttccgtttctctcaggagacgaaccgatgccgcattttgatataacaaagacagattttcactttcataaaacagccggcgaatgggatgcagccagaccgtcagcagccatcaactgctttgccgacggcggaacgaacgcccacgtcattctggaagcttgggaagaaaaagatacccgaatgaaaagaaagccgctgccggtaccgtcattaagacgtaaggctctggtaaaagaacctgacgtacgagcggagaaacaagagcttcctgcgaaaaaaatgttttggaaagcatttaaataagagaggagtgggaaggaatgatatcggaaaaaatcaatatctcactggatcatcccatcatgaagggccatatggtctttggtgaagcggtattgcccggtcttgcttatatcgatttgatttatcaggtttttcaggaacacggttatgtatacaatgagcttgaattgaagcacgttacgatttatcagcctttaaccgtcagtgaaacggctgcaatcattctgaccattcaatgttctgatagcggagatggaaagtggctcatctccctttcagggcagaaacagcaaggtgacgagctgtcagacaatatacaatatgcgacggctgaaatggtgaaaagagacgctgtcacatttgacgaaatcattgatttcagcgatgtgaagcagtcagccaggtctctgaatcttgatgatatgtataaccgctgtctggatcatgacttggttcattccggcatgatgaaatcaaatggacaattgtacgaaacagaaagcggcatgctggctgagctttcttgcgaagaaggaaaagatttctttttattccatccggcccttttggatgcgagcggaatcggggggagcggtttgctttcagaaacaaaccggcttcacctgcctttatattatgaatcgttcacggccgctgacaggcttcaatcagagtgcacggcgcgtatcgccgcttccggcgtccgtcaggaaaaagaactcacaacgatgacgatcgagtacttcagccgatccggacaaaaggtggcggagcttaaaaacattacgggaaaagcggttcggctcgaagacgcgaatacagccgaacagaatcaacaggctgcagctgagccggaaagcgcagatgaaaaagacatcattctgtttttaaagaagcttttggctgataagcttgggcaaccttgggagacgctggacgttcttgcaggctactacgagcttggactgaattcatcttctttgcttgagattgtacaggatatcagtaaaaagacgggtgctgacctcgcgcccactcttctctttgaatatacaaatataaaagaactcgcagcctttctgaaaaagactggttcatttgaatatgcggaggaacgtgcagccgaatcatcacgatctgaagctgaagcgccggacgcgccagaacatcataaaaacaccggagacatcgcgattatcggaatggccggccgctatccgaaagcgaaaagtgtggcggagttttgggaaaaccttaaggcaggcaccgattgcatcactgaagttccgaagtcccgatgggattggaaaacatatcaaaacgtaacgtccccgtctggaaaaacagtatcaaaatggggcggtttcattgacgatgccgactgtttcgatccgcagtttttcagaatctcaccgcgtgaggcggaaacgatggatccgcaggagcgcctgtttttagaaacatgctgggaaacgattgaagatgcggggtatacgcctgaaacgctggggaataaaggggagaaacagcatccgatcggcgtatttgcaggggtgatgcataaagattattccttaatcggcgcagaacaattatctgaagctgatccttttccggtttcactgaattatgcgcagatcgccaacagagtgtcctattattgtgacttccacgggccgagcatcgcggtggataccgtttgttcctcatcattgaccgccgttcatctggccattgaaagcatccgccgcggcgaatgtgaagccgcgcttgcgggaggggtgaacttgtcgctgcacccggcgaaatatctcagctacggaagcgtagggatgcactcaagtgacggccgctgccgcacattcggcgagggcggggacggctacgtttccggagaaggagtcggtgcggtcttgctcaagccgctggaaaaagccgaacaagacggcgaccgcatttacgcggtcattaaaggaagcgccgttaaccacgtcgggaaagtaagcggaattaccgtcccgagtcctgctgcacaggcagaagtcattaaggcctgtctgaaaaaagcaggtatcagcccgcggaccgtcagttatgtggaagcccatggcacgggtacttcgttaggagacccgattgaaattgaaggtctgtcaaaagcgttcagccaagggacgcaggatcagcaattttgttccatcggttcggtcaaatcaaatatcggtcacgcagaatcagcggcggggatcagcgggttaacaaaagcggcgctgcagcttcatcacaaaacgcttgtcaaatcactgcattctgcggaattaaatccttacctgaaatttgagggatctcctttttacgtacagcagcagactgctccgtggaagcagccggcagccgaagaaaacggaaaagtcacacattatccgcgccgggccggactcagttccttcggtgcatcaggttcgaacgcccatatcattttagaagaatacattcagcctgaacaaaaagcgcctgcacctgagaacaatgcagcaaaactcatcccgctgtcagcaagaaataaagacaggcttctggcctatgcggaaaaactagcccgatcgctttcagaaaagacggtgctgtctgaactggcttatacacttcagacaggacgtgaagcaatggaagagagagctgtcttccttgtaaatgacatccgcgacttgaaagaaaagctgaatgatttcgtaaaaggaaacgaaaacatccccggtctttggcgcggacaagccgagctgccggaactgagcgaaaccgctcccgagacggatgatccgatacggcttgccgagttatgggcagaagggaaaataatagattggaataggctgtacgcttcgggtaaaccgcgtaaaacaagcgttccgacgtatccgtttgcaaaagaacgctattggattccgcagcagaaaaaacaggagaaaagcccgtcaggcacagtgctgcatccgcttttacaagaaaacacgtcagatttttcgcagcagcgcttcacgtctctttttactggagatgaatttttcctatctgaccatgtcgtcaacggacaaaaaatactgccgggcgttgcctatttggaaatggccagagaggcggttaaaaaggctgctgccgtgacggaaaaagaccatagcgtcacactcaggcaggttgtttgggtccggccggtcatgattgaagacaaaccgaaggaaatacatattgccctttacccagaagataatggtgagattacctatgaaatatacagtgaggcagaaaacggcgaagatccggttattcacagccagggtgaagcggtcattaccgaaccggaaagcgcccagattgatatcgagtctgtcaaagcttcctgcaattcagggaccgtgactgcggaagaatgttacggtgcttttgagaagatcggtctggattacggagaggcatacagaggcgtacagcaattgctgatcggagaagaccgattattggcccgtatttcactcccggctgccgtacatgacaataaagaacagtatacgcttcacccgagtatgatggacgccgcttttcacgcctccgtcggtctgcttgtccgctcaatacatgacgatgcagacagccacgagctttctctgccgtttgcgatgcaggaagtggaagtgttcgggccgtgtcctgaacatatctggtcatatatccggtacacagaaggcagcaaagcagatgacaacgtaagaaaatttgacattgatatgtgcgatgatgccggtacggtttatgtccggatgaaaggcgcgtccgtccgggcgcttgacacaggccaaacagcgggcggagaaaccccggaagcgcctgtcggccatacgatgctgattccggcatgggagcccgttgcacttgaaaaaacgaagaaagcaaaaacagcggaaaagcagactgcggttttcggtgaaactgacagaacgcatacgcgcataaaagaacatctgccgaacgcttcctattatccgatcagaggtacggatgatatcacatctcttacgtacatgcttgaaggacaaaaagagctggagcaaatcatttggcttgctccgcaggctgagagtgcttgcagcctcaaggaacaggaaagaaacgttcttcatgtgttcaagctgatgaaagcattacttgccttggggtacggagaaaaacatttggactggtgcatcgtcacagcaaatgcccagccgttttccgatcaagacagcgccgccccgtcacaggccgcagtcagcggacttgccggaacaatggcgaaagaatatccgcattggaatatccgcatgattgacacggaaacggacggcagctggccggtcaaagaggcgctcagtctttctgccggaaaaaacggtcaaatttgggcgtaccgcaatcagcagctgtttgagcggcagctgataccgcttgacaatatgccgaaaaacggcacgctgtaccaaacaggcggggtttatgccgtgatcggaggcgccggatatcttggcgaggcatggagtgaatacatgatccgccgctacaaagcacatatcatttggatcggaagaagcacactgaatgattccatacaggcgaaactcgaccggctcagcgcattcggcccggcgcctgaatatgtttccgccgatgccgctgacagtgcttccttagagcgggcttatcagttcataaaagagcgtcacacaaaaatgaacggaatcatccactcggcaatggatctgtctgagcaaagcttaaataatatgaagacagaagagttcaaatcggtgctgcgggcaaaagccgatgtcagtgtgtccatggcggaggtatttggacgggagccgcttgactttgcgctcttcttctcctcgcttgtggcatttatccataacgtgaaacaaagccactatgccgcaggatgcgctttcagtgacgcatttgcgaaagaacttgatcagacgtggaattgtccggtcaaagtcatgaattggggctattggggcaacagcgaagcggctgaagacggcgattttattcagctgatggatcagatcggattgggattgatcgaaccggacgctgcgatggaggcgcttgaaacccttatgacgctgccggttgatcaagcagctttcattcatacgacaaaaccggtcgcagtcgaagggatgagtgaaacagaaaaaatttccgtttatccgtctcagccgcttgtctcttcacaacagctgaaggccgctccgcccggcgcacgtcttgtaaaagaggctgaacatcaaaagctcgatgattttctgtatcggcttttgatcgcccagcttaaagaagcagacttgctgacgccgcaaagccttaaagcgtatgagcccgaacacgaatattttaaaaaatggctcaatcaaacgatcgctttccttctggaacatggttatctggaagggaatgcggattcatataaactgtcggcccgtgccgaagacacaaccgcctcgctatggcaaaaatgggagcaggaaaaagaggaatggctcaataacgccgatacaaaagcgatgactgttttagccgagacgatgcttaaagcactgccggacattctgcgcgaagacgtgccggcgactgacatcatgttcccgcactcttcaatggaacttgttgaaggaatttataagcacaatcaagtcgcggattactttaacagcgccctgtcagaaacattaacggcttatgtgaaagaaaacatcagcaaacattcaaaagccgagatccgcatactggaaatcggagcgggcacaggcggcacaagcgcaggcatatttgaaaagcttaggccgtatcaaaaccatataaaagaatactgttacaccgatgtatcgaaagcttttctcgtgcatgcggagacggaatacggcaaacggaatccttatctgacgtataagctttttaacgcagaagcgccgcttgccggccaggacatagagccgggcgcatacgacatcgtcgttgccgccaatgtgctccacgcgacgaaagacatccgccagacgctgagaaacgctaaagccgtcttaaaagacaacggtttgctgctcttaaatgaaatggcgggaaacagcctgttcccgcatattactttcggactgcttgaaggctggtggctgcatgaagattctgcccttcgtattccggggtgcccgggcttgtatccggaaagctggaagcgcgtgttagaaagtgaaggctggcattctgtcttcttcccggcagaagcggcacatgaattaagccatcagattatagcggcaaaaagcaacggcgttgtccgccaaaaaacgcttaaagcaggggccggaaaacggaccgctccgccaaaagcagcacaagcgccggaatttaaagcgccgcaaacaacggtgcaaaaaggcgacacgtctttaacagaaaaaagcaccgagtacttgaaaacgttaatcggagaaacgttaaaaattccgccggctcaaattgatccgaaagcgccgcttgaaaaatacggaattgattctatcgtcgtcgtacagctgacaaacgcgttacgaaatgtattggaccaagtcagcagcactttattttttgaatatcagacgatcgaagcgctcgtcgctcacttaatcaaaacgaaaaaagacgcgatgatcaaactgacgggacaaacgcctgttcaggaagaacggaaggcatcaccagaaccgcaggctgtacagccggccaagccgcttcgcactgactggcggcggagggaaaagcgggcagccagagagaccgtccggcaaagttcggttcgcgacgtggccatcatcggtgtttcaggacgctacccgcaggcaaaaacagcggctgagctttgggccaatattaaaaaaggaaaaaactgcatagaagaaattccgcaggaacgctggaactggcaggattactacgatgaagagaaaggtaaagaaggctctatttatacgaaatggggcggcttcattgaggatatggacaagtttgatccgctgttctttcagatttctcctttggaagcggagcgaatggacccgcaggagcgattatttctagaaacggcgtatgcgagtatcgaggatgccggctatacgcctgacaacctgtgccaaagcagaaaaattggtgtttttgccggcgcgatgaacaaaaactacccgacaggctacggctactggtccattgccaacagggtatcttacctttttgatttccaagggccgagcattgccgttgatacagcctgctcctcttctttgacagccattcatctggcgcttgagagcatatacagcggttcaagcgaatgcgcgattgccgggggcgtaaacatagtgaccgacccgattcattatatgaatctgtcagtcatgaacatgctttccgcaagcgacacgtgcaaatcgttcggagaccgcgcggacggttttgtagacggagaaggggtgggcgcggtcgtattaaagccgttggagcaagcgattgccgacaacgatcacatttacggtgtgattaaaggaagcgccattaacagcggaggcaaaacgaacggatacaccgttccgaatccgaatgcgcaggccgccttaataaaagaagctttcgaaagggcaaacgtcccggcgcgcaccgtcagttatattgaagcccacggcacggggaccgcattaggggatccgattgaaatcgccggattaacgaaagcatttgatgaggatacaacagacaaacagttttgcgccatcggctcagcaaaatcaaatatcggccattgcgaaagcgcagcgggcattgcgggtctgacaaaaatattattccagctcaaagaccgccaaattgcgccgtccctgcacgcggaacagctgaacccaaatattgatttcgcgtatacgccgtttgccgttcagcaggagctcggtgagtggaaacgtcccgtcatcggcggcaaagagcttccgagaagggcggggttaagcagcttcggcgcgggaggagcaaacgcccacctcatcatagaagaatatacggcagacaaagagcctgatgagacgccggcagatcagcccgccatcatcgtcctgtccgcgaaaaacagcgaacggctcactgaaaaagcaaaacagctcagagacgccatccgtgaaaaaagatacagcggccgcgatcttatgagcatagcctttactctccagactggccgggtgccgatggaagagcgtctcggttttatcgtccattcacttcatgaacttgaggaaaaactgaacggatttatcgccggacaaaacagcgccggactgcaccgtgacggcacggaagaaaacaaacggatgcttgccgtatttgcggccgatgatgacatggaaaccatcatagacgcttggatcagcaaacggaaatattctaagctgcttgagctttgggtaaaaggattggacatcaattgggcgaaattatacggagaccgtcctccggcccgcatcagcctgcctgcttatccgtttgcgaaagaacgcttctggcatcagcagcctgtacaaagcaaggccgcgcccgttaaggcgccggctgatgaaagtgatccggcggagcagtttgaagtaatggcttttagagaagttcttaaagaacaggctctgccggctgccggagaaaagcaagtcaaaacggtgatttctttcttaactgatcagaagaagcagcaggaagccgtctctgtgatcaaatcgtatgacagtgacattgacgttatttttatcgctcagggagaccggtatgaggccttgtccgccggccgctgccaagtggtgcgggaagatccgcaatcatatgtgaacgcttttgcggatattcaaaaagagtacggtgaagcttctgccattttgtatttatgggcgcttgaagataaaagctgcatcgaagattattcatgtattgtccatattctcaaagcaatggctgagaccggtctgcagccggaaaggctgttattggcgggggaatatgcatccggtctggaaaggtgctacttggaatcatggatcggctttgagcgttcgctcggcattgttcttccgaaaacaagtgttaccggccacttccgaaaagccggcgcggccataacggactggatgagaaccatttgggacgagctgaaagctgaaacagaccataccgttttcttggaagagggaaaacgatatgtctatcacaccgaaccaaccggactaacgaaagaaaacggcaggatcagaaccggcggaacatatctcattacaggcggattaggagggctcggctacttatttgcccgccatctcgcccggaactaccaggcaaatgtcattctcacggggcggtcgccgatcaatgaagaaaagaaagaaaaaatgaaagacctggaaaatctcggcgcgggtgttctttacgccgaagccgatgtttgtgatccgatcggaatgggcgactgcatcaagcgcgcgaaagaacgattcggagctattcacggcgtcattcatgcggcgggcatcgaaagcagaacatccgtctttgaaaatgaaatcaggaatttccgcagtacgcttgaaccgaaaataaacgggagcctgcttcttgacgagtggctgaaaaacgaaacgcctgatttcatctgctacttttcatccacatctgctgttttaggagattttggatgctgtgattacgcggtcgcgaacaggttccaaatggcgtatgcccgctataaaaacgaacaatccgaaagcggaaacgcttttgtcataaactggccggtctggaaaaacggcggaatggccgtcggcggtgaagagacgacgggcatgtacctgcaatcaagcggacagcgcctgttagaaacagatgaaggcattgagctgtttgagcgcatcatttctcaagacaacacccagtgccttgtcattgccggcaaaagaagccgcgccgaacgatttttaggcatacggcgggacgattcatcaaaaccggatgcgcttttggaaaccgtgagccgccgcatcccggaagaaagcacggaaaaacggctcgaagcggatttgaaagagctgatacacagtctgctgaaaatatctaaagataaactcgtcctgcataaaaactgggcggaattcggatttgattccatctatttagccaaatttgccgctcttttgtcgagtcattacggcattgaagtcactccggctttattttacagctatgccacgctcggagacgtcatcagctattacctgacagaacacaaagaaacgatcaaaacgttttaccgaacggaagaaactgaaacaaaagccgccgctccgggtaacaaggagtacacggatcaggagatcatcgccatgatgaaacaggtctctgaggggacattagattttaaaagagtgcaagacatcatagaagggagtaagacttatgaatcataaagaacttctcgatgcctacagatcaggaacgctcaccatcgctgaagtagaacaaaagcttcaggctttcaagcggacaactgcaaaacgtccgctttctgaaggccagaaaggtttgtggatgcttcagaaaatgtttccggagatgagcgcatataacattccgttatgctttcgttttcaaaagctggatatcgagacattcaaaaacgcccttttgtccgtgcagcgccagcaccctattttgaccagtgtgataaaagaggaaaacggccttccgtatcagatagaagatacggatcggcattttccgattgaagaaatggatctttctgaattaagcgggcgtgacgctctttcgtttattaaagaaaaagcaaaagaaccgttcgcgcttgaaaccgggccgctcctgcgtgttcatgtattccggcgggcgaagcgggagccgattgtgttaatcaccattcaccatattatttttgacggcgtctctcttatgacgtttatgtcggcgctgctggacgcttatgtaaaagcaagtgaaggcaaagaacctgtcatggttcagcaggccgcagattatcatgactttgtgaaatgggaaaaagagctgctggaaagcgaagcgggaaaaacgcatctctcttattggaaaaagcagctggaaggaccgctgccggtgcttgagcttccgtcggattatccgagatcatcggttcaaacttgcaaagggcaggcgtatcagcgcttgcttcctgatgaactgaaccggcagattaaagtgtgcgcccaaaaacataatgtcaatgaatccgttgtgtatctcgctattttcaaagggctgctctatcaatatacgaatcaggaagatgtcatcgtcggcatgccgacgatggggcgctctgaggctcaatttgaatctgtcatcggatactttattaatatgatcgcggtcagaagcagggagacgggcgccaaatcctttacggcgtttttgaaggagctgcagctgacactggcagaagggctggaccatgccgcgtatccgtttcccgcgcttgtcaaagaattgaagacggaacgctcgcctgcggtttcgcctgtttttcaaaccgcgtttttctatcaaaacttcttccggacagaaggagcggaaaagctggcggaactatatcaatcactcggcattgaaatgatagaagacattcatcaggaaggcgaatttgagcttgcgcttgaagtctataaaaaagaaacgggaaccgtcctgcaatttctgtacaacccggatgtctacagcccttctttcatcgaacggatggcggagcattatatgaaactggcagaaaaggtgctttctgatccggagatcgcttttgaagcctgttccggcctgctcaatcaaaaacgtgaagcaagccgatctcatcagccgaatgagcgctgcattcatgaagtgtttgcggaaaaagccggacgccaccctgacagagaagccgtcacatacggtgaaaacagtcttacatatcgcgaattagatgaacgaagcacggcgctcgccgtgtacctgcaagaaaagggcgtcacaccggaatgcccggtcggcatttgtacggagcgttcttttgagatggtcatcggcatcctcgccattttaaaagcgggaggcgcgtatgtgccgctggacccggcttttccaaacgaacggatggcgcacgtgttgactgacagcggcgtttcaatcgtattaacgcaagcaaatacgcgcggcatgattgaacagttggccgtcggcggtgtgagcacggtggaaattgaaaagagcggacgttctgtcagcggggcaaaactgacgccgcgttcaaaaccgcatcatctcgcttatattctatatacgtccggaagcacgggaaaaccgaaaggcgtcatggttgagcacagggccatcatgaatacgctgcagtttttggaagctgagtatccggtcgcgcaagaggatgcctatttgttaaaaacgaattacgtatttgacgtttcgatttctgaattattcggctggtttatcggaaacggacggcttgtcattttgccgcctggtgcagaaaaaaacccgcagctttgtatggaatacatccaaacccaccaggtcacgcatctgaattttgctcccgccgtgtttaatgtatttctggaaacggtaaagcggcatacggcatttacagaagacggccctgtgaaatatgtgatggtggccggtgaggcatttccgaaagatttagtaaaaaaggccgtttccatcttcaaacatgccagaattgaaaacatatacggcccgacggaaacatctatttatgccgcttactacagctgcggccaaaaggaaatcacaagcaggaatacgccgatcgggaaaccgattcaaaatacacggctttatattgtcgatgaaaagctcagccccgtccctgacggtgtggccggcgagctttgcgtggccggcgccggtctggccagaggctattacaatcagcctgagctgacggcggcatcatttattgataatccgtttagtgaaggagaaaagctttacaagacaggtgatttggccagatggctgcctgacggaaatatagaatatgctggccggattgacagtcaggtgaaaattcgcggcttccgcatcgaattgggagcgattgaaacgaaattgaacgaacatccggacattcttgatcaggcggttgttgttcaggaaaagaacggacataaaaagctgattgcttattatacggcccgctccggtcatacggcagatgaaaaagcgctccgcaaccatcttttatcgagtctgccggattatatggcgcctgcccattttatccgtctggatgcgctgccgttaacaccgagcggaaaagtgaaccgcaaagacctaaaacagcgcaaggtaattgttcaccggtctgaaaagacgggcagactgccgttatcagaagcggaagcgaaagtgaccgcaatatgggaagacctgctgaatacggcgggcatcaaaaccgaagacggctttttcgatgtgggaggcgactcgcttttggctgttgcggcggcagaacgcattaaacaggagctggaatgcgattttaccgtcacggatttattcgaacactctaccattcaggcgatcagccgatttattgttgaaactaaacaggcggctgaatcagaggcatcaggccaagatgagagagaaagagaacaaacaccgcaaaacggggtgccgtcttactttgacgacagtgtggcgatagtggggatttcctgccagttccccggcgcgaaaaatcatcatgagttttggaagcagttaagagaaggaaaggaaagcgtccggttctactcggaagaagaacttcgggaagccggcgtacctgaagatttgatcgaaaatcccgactatgtgccggcattatcgacgatagaaggaaaagatctctttgaccctgagttctttcacatttctccgaaagacgcagaatttatggatcctcagcttcggcttctgctgctacattcttggaaagccgtcgaggacgcgggatatgtatccaaagagattccgaagacaagcgtatatatgtcggcaagcaataattcgtatcggtcgcttttaccggaaaaaacgacagaaggccatgaatctcctgacggctatgtctcatgggtgttagcgcagagcggcacgattccgacgatggtttcccataagctcggattaaaagggccaagctatttcgttcattccaattgctcatcatcattagtcggtctttattcagcctataaaagcatcacgagcggagaatcggaatacgcgctcgtcggcggagcaacgctgcatgcagcgacaagcatcggctatgtgcaccaaaacggattgaatttttcaagcgacgggcatgtcaaggcatttgacgcttcagccgacggtatggcgggcggagaaggagctgccgtcattctgctgaaaaaggcgtcgcaagccgttcaggacggagatcacatatacgccatgctcagaggcatcggtctgaacaatgacggagcggataaagtcggtttttacgcaccgagtgtaaaaggtcagactgacgtcatccagcatgttttagacagcacgaatattcacccggagacgatttcctatatcgaagcgcacggcacaggaacgacattgggtgatccgattgaaatgtccgcgctgcagcaagtgtataaacgttacacggaccgggagcagtattgcggaatcggctccgtaaaaacgaatatcgggcatttggatacagcagcgggtctggccgggtgcatcaaagtcgccatgagtttatatcatcgggagctggcgcctaccattaattacacgtcaccgaatccgaatatcaaattcagcggttcgccgttttatgtggcggataagagaaaatcgcttccggagagagagacgccgcaccgggcagcgttaagctcattcggactcggaggaacaaacgcacacgccatttttgaacagtatgaaaacaaaacgatcagcggatcaaatgacggacagccgccttatatcgttccgctgtcagcgagaaataagcaacgtcttactgcctatgcaacttgtttatccggctttctggatgaagccgaaaacgatgtttccttgcatgatctggcatttacgtatcagaccggacgtgaagcgatggaagagagagccgtttttatcagtcatgatcgtcacgatctgaagcgtcagctgcaggatttcatcaacggcaatgaccaaaacatcttacggggcgaaaaagtgagaagcagagaagtgtcggctcaggagatggaagagcttgcggcatgtcagacacgtgatgaaaagctgaaagcacttgcggcgctctggattgaaggagcgcgtgttgattggggcttattgtatcaggattccgcgccgcgaagaatcagtgcgccgacctacccgttcgcagaggagcgcttctggccggaagaaactgtgaagcaaacagatgcgaagtttttgcatccgctggtacatcagaatacatccgtcttgcaggagcagcggttcagttcggaatttacgggaaaagagtattttattgccgagcatatcattaaaggaatggcgatcgtgccggctgccgtcacccttgagatggcacgggccgcggcggagaaaagcatcggcggggcaacagaggattctctcggcctgcgcttaaagaatatcgtatgggtccgcccggtgatagtcgatcaggacgctgtccgtgtccatatcggactttatgaagaaggggacggacagattcaatacagaatgtacggcggtaacgattctatcggtgaagaagctcctctttataatcagggcatcgctgaaatcatccggaaggaaccggaggaagcggcggatattgagcagctgaagcgccggtgcacgcagggaacaatcgaatctcaagcgttttacaaaggaatgatcggagctgattacgggcctggctataaaggtgtccagcttgtatacaaaggcgaagaccggctgcttgctaaattgaagcttcctgaatccctctcccatacgaaagctgattatatccttcatccgagtatgatggacggtgcgcttcaggccgccgaatatttgcaaaacgtgacgagagcgctgctggcagaaagcggggaaccattcaaagccgcattgccgtttgctttagaggagctggacgttctgaatccgtgcgctgatgatatgtgggtgcacgtcacattcagtgcgaacaataaagccggcgatcctatccaaaaagcagatattgatttatatgacaataacggctggctttgtgtgcggatgagaggtttctcaacgcggatcatggaagaaaacgcgggtgccggcgtttcggtcagccgtacggacacattgttcgctgaaccggtctggaaagagcagacggcaccggccgatcatgcgccttcgtatgaagagcatatcattttcctttgtgagtacgatgaagccgttaaacaagctgtcgaagcaaagcttgaacatgcacgcgtcattatcctggacgatcgtcccgcatctattgcagagcggtatcattcttatgcgggtcagctgtttggccatatcaaaaccataatgaaaagcaagccgaagggccgcgttctttttcaggctgttacgcggtcagcaggcttacagcaggtgttctcaggcattaccggcctcttcaaaaccgcatgtcttgaacattccaagctgatctgtcaaatgatcgaagtcgaggagaaagaaagtgctgaaggcatcgcggaaaaagcggcggaaaaccgtatgcatgccgaaagcgtccatgtgaaatatgaaaacggcaagcgcattgccgctgattgggaagagatggatatttctcaagcggagccggacattccgtggaaagacgaaggcgtttatctcattacaggaggtgccggaggtttaggtctgatttttgcaaaagagatcgcaaaccgtacaaaagacgccgtcatcatactaaccggccggtccgctctcggagaaaagcagaaagacatgctggaaacagtacgtgctgccggcgcttctgttttctacgagcagaccgatgtcacggacgaagcagaagtataccgattgatccgcaatatccgtaaacggcacggcaagctggacgggattgttcacagtgccggcattataaaagacaactacatggtgaagaagacggcagaggaattccaacacgttctcgctccgaaagtgaagggccttgtgtatcttgatgaagcgtcacaacatgagaaattagatgtctttattgtcttctcatccttatcaggtgtgcttggaagcgtcggccaggctgattatgcgtctgcaaatgtttttatggagatgtatgccgagtaccgccgttctttacaagccgcaggacaaagatacggaaagacgctttctgtcagctggccgttatggaaagaaggcggaatgcaggcaggaaagcagacggaagatatgctgatgcagcaggcgggaatcgcaccgctcagcacagatgccggcatcaaggctttatatcaaggcttgatgagcgggacagcccggatgacggtttttgaaggagatgtgaaacacatgaaagcaaaacggttccgcaaagagaatgatcatccggaagcagagatcggcgtacgtcatgacattgatgctgacagcctgcttgaaaaagtgaagcatctgttaaaacagcagacggcctcgctgttaaaagtaaacattgacaaaattgatcctcatgaagaaatgacaaaatacgggctggattctatctcgatgactgagtttacgaaccagttaaacaaaacgtaccggcttacgttaacgccgacgattttctttgatcatccgacaatccatgaatttgccgttcatttaatcagtgaatacgaagaggaatttgccggacggtttgcggtaaatacaaaaacgattcaatcggcaagaccggtaaaagagactcaaattacgcgcccggccgttaagcgacgccgcactctgcctgagacacttccgcagacagtgcagcgggaccaagggccggaaccgatcgcaatcgtaggcatcagcgggattttcccgatggcagaagacattgaagctttctggcagaacctgaaagaaggcaaagactgcatgaccgagattccgaaagaccgctgggactggcgggactattacggggatcccgcaaaagaagccaataaaacaaacgtcaaccaaggcgggtttattgacggaattgctgaatttgatccgttgtttttcgggatttcaccgcgggaagcggagcaaatggaccctcagcagcgcctcttgctgacgtatgcgtggaaagcgattgaagatgccggatatgcgtcaaagagtctctcaggcacaaagacaggtgtgtttatcgggaccggaaacaccggctacggttctcttttagccaatgccgatgcggcgattgaagggtcatccgcggcgaatacaagtccgtctgtcggaccgaaccgtgtcagctatacgctcaatctgcacgggccgagcgagccgattgataccgcctgctcaagctcactcgttgccatacaccatgccgtttcttcaattgaagaagggacgtgcgacatggctttggcgggaggaatcaatacgattgttcttccggatgtgtatatcagctttgacaaagcgggcgcgctgagtaaagaaggaagatgcaagacgttctccgatcaggctgacggttttgcccatggtgaaggagccgggctctttttcctcaaaaagctgaaagccgctgaggcggatggggaccatatttacggcgtcattaaaggaagcgcggtgaatcacggcggccgtgcggcatctttaacaacgcctaacccgaaacaacaggcggaagttattaaagccgcatataaaaaagcgggcattgatccgaaaacagtctcttatatcgaagcgcacggcaccggaacagaattgggggatcccgttgaaattaacggcctgaaacaagcgttcagctcgtttgcagacggaaaagagaaagcggccggctattgcggcttagggtcggtcaaaacgaatatcggccatttatcccttgccgcgggagcagcgggcattattaaaattttgctgcagatgaagcatcgcacattagtcaaaagtctccactgtgagacggtaaatccgtatattcagcttgaagacagcccgttttatctggtgcgggagacgatggaatggaagacgcagacggacgaacgcggaaacgaacagccgcgccgcgcgggcatcagctcattcggcatcggaggcgtaaatgcccacgtcgtcatcgaagaatacattccagaagacagagaggaagcagatgattctcatatcgacccatgtcttttcgttctgtccgccaaaaatgaaaaacgcctgaaagagcaggcaaaacagctgaaacgtgcgcttactgaaaaacggtacgatcattccagcctcgtttctatggcatatactctccaaatcggaagggacgccatggaagaacgcctggcggttattgccggatccgcagaagaactgcaggaaaaactgtcacagtttatcactggagataagcatgcggatttgtacagaggaagaatagacaaaggcacgctgcaaatgctgacggaagatgaagaaattcaagaagccgttgaaaaatggatggcacgcggcaaatacgcgaagctgcttgaattatgggtcaaagggctgaacgtcgattgggcgaagctgtatggagaccggccgcctaaacgcatgagcctgccgtcgtatccttttgcaaaagaccgctattgggcggcgaaacacaccggaaaacacgaaaaaacaagcactgtatctgccggaaaacaagacgcgcttcatccgcttctgcacagaaatacttcaaaccttgcagaacagcggttcagctcaatctatacaggagaagaattttaccttgcggatcatgttgtaaaaggcgtgccgattttaccgggtgtggcacatcttgaaatggcgcgcgcagcaatggaacaggcatctgaagttccggccggacaaggaagcgtccagcttaagaatacggtttgggtgcggccgattaccattgaagacgagccggttcatgtcaacatccgtctcattcccgaaacggcaaatgacgttcaattcgacatttactgcggccgggaaacagatcagccgtccgtttacagccaaggggcagtatcagtccgccctgacgcaaaggctccggtcattgatctccaaaaactgagatcacaatccgccgagacaccgttttctgcagatgaagtgtacgatatgtaccgcaaaatcggttttgattacggcccggctttccggggtgtcaaagcgatttatacaggtgatgatttcgtattgggcagactgtctcttgatgcggcttgtgcggacacggtacaggagtatgtcatgcatccgggcttaatggactctgcattgcaggcatcaagcatattaaccggaacaaatgatgaacaactgatgcttccgtttgcggttcaggagcttgaagtattcagcgcatgcgctgccgagatgtgggtttacgccagactttctgaagaccacaaagccggacatgttgaaaaacgcgatcttgatatttgtgatgaaaatggcaaggtttgcgtaaggctgaaaggtttgtcattcagaacggctgaaaaagaacctgagaaaaaagaaaaagctccggaaacgctcatgcttgagccggtatggacacgaagcgatgaaactgctgctcaaacggaaccggtttttgcccggcatatcgtaatgctttgtgacacagacgccggactaaaacaagcggttgaagccgcgggagctgaatgtattgaaatgacctccctgcacgggaaagcggcggcgcgcttccgtgattatacaggacggatattggagacgctgcaaaaactgctgaaggaagagacggaaggagacgtccttatccagacggttctctctaaaacagataagcatcagctgctctcagggatttcagctctgctaaaaacagccggcctggaacataaaaaactgaaaacccagctgattgaaatagaaccagcggaaaacggcagaatcacagacatcatcagagaaaataaaacaagggctgatgacagccatatcaaatataaaaacggcatccgatacagcgcagatgtcaaagaaacggccgtgtccggcggcaaaatacgcattccgtggaacgacggagggatttatctcattaccggaggagccgggggcctcggctttattttcgcgaaagaaatcgcccggaaagtcaaagagccgacgctggttttgacaggccgttccgcattaagcgagaatcagcggatgcagctgaaatcgcttgaatcactcggagcaaaagcggaatacaaacaggctgacgtaacaaacgctctaactgcggcagacctggtcaaaacaattgaaacggaatatggcggccttcacggcatcattcatagcgcgggtgtgatgaaagatcaatatatcgtaaagaaaacaaccgaagagttttacagtgtattggctcctaaaacggacggatttgtcaaccttgatgaagcaaccgagcatttagcgctggactttttcatcgttttctcatccatttccggtgtcaccgggaatgcgggacaggcggattatgcggcggcaaacgcatttatggacagctatgcggcataccgcaacgcgctggttacggcaatgtaccgccacggtcacacattgtcaatcaattggccgctttggaaagacggcggaatgcaagtcaatgaagaaatggcgaagctcaccgaaaaaagaaccggtgtaacgccgatgcgcactgaaaccggaatagaagctctttacaaagcatggagcacggggaaaacaagcgtgctcgttatagaaggaaaccgcgccgtaatgcgggaaaaactgcttcaaaagactcccgcatccgcttttgcaccgattaagaaaacggaagaaacacctgcgccgaaagacctgacggccaaacttcaggaattgctggcaaaagaagtttccgggcttctgaaaataaacattgaagaaatcgatatcgaattggagttcaatcaatacggatttgattccattacgctgacggaattcgccaacaagctgaatgacacttatcagcttgatctgacaccgaccgtattttttgaatatgcgacgattcaagccttggcgcatcatttagcagaagactatcaaacgcaatttgccggcagcacacagccgaaagaagaaaagaaaagcggtgtaacagatgatggcggcatcagactggcagggaacaaacgatttgcaaaaacagccgtacagcatgttcagactgcggctgaacataaaccggaaccgatcgccattgtcggcatgagcggagtgtttccgaaggccgcaaatattgatgagtattggcgcaatttagaagagggaaaagattgtataacagaggtgccggcggatcgctgggactggcaggagtattacggtgacccgcttaacgaagccaacaaaacaaatgtaaagtggggcggatttattgacggagttgcggaatttgatccgctgttcttcggaatttcaccgctggaagccgaacagatggatccccagcagcgcttgttaatgatgtatgcgtggaaggcgatagaagatgcgggatattccactaaaagcctttccggcacgaaaacaggcctgtatatcggcacgggaaataccgggtacggctcactgttttccgacctggatatcggcggtgcgtcagccgcaaatatgagtccgtcagcagggccgaaccgcgtcagctatatgctcaatctgcacgggccgagtgaaccgatcgacacggcttgttccagctcgctggtcgcgattcatcacgccgtatgcgccattgaaaacgggaactgcgagatggcgatcgccggcggcgtgaataccgtcgtcacaccgcaaggccacatcgcttatgataaagcgggtgcgctgagcaaagaagggaaatgcaaaacgttctccgacagggcggacggatttgccgtcagtgaaggtgccggaattctgtttttgaaaaagctgtcagaagcggaaaaatcaggcgatcatatttacggcgtcattaaaggcagcgcggtcaaccacggcggacgtgcgaactccttgacgacaccgaatccgaaagcccaggcggaagtcgtcagaacggcttatgacaaagcgggcattgatccgagaaccgtcacttatatagaagcgcacggaaccggaacggagcttggcgatccggtcgaaatcaacggcctgaaatccgcctttcaaaagctgtacgaaaaaacaggcgatcccgccgtttacgcgagtcactgcggtttgggatcggcaaaaaccaatatcggccacctgtcactggcagccggtgtcgcgggtgtgatcaaagtgctgatgcagatgaagcataaaacacttgcaaaaagcctccacagcgaggtcatcaacccgtatatcaaactgaaagacagtccgttttacatcgtacaggaaaaaagagaatggacagcattgaaagacgaaaacggcaatcatctgccgcgccgtgcgggaatcagttctttcggcatcggcggcgtaaacgcccatgtcgtcattgaagaatatatcccgaaggaagaaagaaaaacagctgttttcacacaccctcaaatctttgtgctgtcggccaaagaagaagaacgtctgcaggaacaggcgcagcagctggcgcaagcttcttttacggatgcggatcttgccgatgttgcttacacgcttcagcaggggcgtgatgcgatggaagaaagagcggccattatcgcttcctcggccgaagaactgcgggacaagctaaagagctgtgcgaaaggacgttatgacaaagcgggcatttataaaggaaaagcgggtaaaatcccgctgaaatccattatggcaggcgcaaacggcgaagcggatatcgaagagctgataagccgccgggagaatgacaagcttgcggaattatgggtgcagggcgcggatatcaaatgggacggcttatattctgatatcaagccccaacggatgagtcttcctgcttacccgtttgcgaaagagcggtactggatcacggacaaccggccgaaagcagaaaaaccgcaagctgtgccgacggcgcgggtgctgcacccgctgctacacgagaatgtatcggatttaacagagcagcggtaccgatccgaatttacgggacaagagacgattttcaccgatcatcttattaaaggcaagccggtcatgccgggcgtcgcctacttggaaatggccagggcggcggttgctcaggcagtcaaagggcaaaaggaagttccgtctgtcatccgtctgaaaaacatcgtttgggttcggccgatcgaagcggaaaaccgcccgattgaagcgcaaatcagcctgaacccgaggggaaacggtgaaatcgtgtatgacatttacacggattcacaaacagaagcaagcggcaggcagatacactgtcagggggctgccggcattctcggcgccggggaggctccgcaccgtgatataggcgcactgaaagctcaatgcggcctcagcatgctgacttctgaacagtgttacggcttattcaacaaaatcggcattgactacggtcccggacaacaaggaattcagcacattcatatcggaagcaatcaagcattagctgagctccgtctgccttccttcctcgaagaaacagcagatcaatacgttcttcacccgtgtatgcttgattcagctctgcaagcgacaatcggactgaagctgcatgcagatgataaccagctgtcactgccgttcgcccttgaggaactggacattttcagcccgtgcacgaccagcatgtgggcgtatgtcagctcccggggaacggatgaaaaaatacagcggctggacattgacttatgcgatgagacaggccgcgtctgtgtcaggattaaagggatttcttccagaatgatggaaggaccggcgccggaaacatcattaaatggagcaaaccttctggctccggtatgggatcttgcggaattccgtgaccaaagcccggcatataagacggaagaggttgtctttatcgcaggggatgaggaaagcgaggcttttcaattgcatcatccttctgcgaaacggcttcatatcaacccggaggatgaaatagaggctgttgcggctgaactgaaagcaagagggtctttcgggcatatcgtatggatcgctccttttcacagcgatggtgacatggtgaaagctcaagatgcgggcgtcatccagatgtacagagtgattaaagcgatgcttgctttaggatacggaagcaagcgaatcagcttgactgcagtcacaataaaaacacagtccgtacagccggcggacatcattgatccggctcatgcaggcattcacggtttgatcggttcgctcgcaaaagagtatccgaactggcaaacacggctgattgatgccggatgtccggaagatgtttcaaaggcggagctgttctcagcgccgtttgatgagcaaggcaatacatgggcgtaccgcaacaatcactggtacaaacagcgcctcatccctgtacagcagccggtgtcaagccggcccgcttaccaaaaaggcggcgtttatgtcgtcattggcggcgcggggggcatcggcgaagcatggagcgaatatgccgtgaaaacgtatcaggcgcgagtcgtttggatcggcagacgaaaacataacagcgccatccaggaaaaaatcgacagactcagccaattcgggccggcgccgatttatattgaagctgacgcggcaaacccggatgagctcacacgggcgtatgaaacgatcaaacgcacgcacccgcaaattaacggaatcatccattccgcaattgttttagaggatcagagcctggcgaatatgccggaaagccgtttgagaagcgtgctcgctgcaaaagtcaatgtcagcgtgaatatggccctcgtgttccaaaatgagccgctggactttgctttgttcttctcatccgttcaatcatttgcgcgagcggccggacaaagcaattatgctgccgggtgcagtttcaaagatgcctttgccgctcatttggctcaagttcggccgtattcggcggcagtgatgaattggagctactggggcagtgtcggaatcgtatcatctgccgaatatcaagaacggatgaaacaggcgggagtcggatcaattgaagcgccggaagcaatggcggcgcttgaacgattgctcggcggcccattgaatcagttcgtcatgatgaaacaggcggaagagccggaggaaaaaccggaagaaatgatagaagtataccctgaacatcacggctcggcgatgcaaaaactgcgaagctatcagcctaaagtaacaagacatgtacaacaattgagttaaggaggggacggctttgcaaaacactgaagatcttctttacaaactattggcaggccagctgaaatctgtcggattttttacggaaaacgaaacgcagcctgttatgcaggggttttacggcaggtggctggaagaaagcatctccatcttggtgcaaaaaggctttttgaaacagtctggcagtacgtatgtgttaacgggtccgatagagcgtgcggacgttctgtggcaagaatgggatgaaaagaaagctcctttactcaaggacagcagcaaacgggcgatgatcaccttagtggagaccgctctcagagctttgccggatattttatccggcagagtttctgccactgatgttctgtttcctgattcctcaatggaattggttgaaggaatctataaaaacaatgaaacggcagactactttaatgaggtgctcgctgacacattgacggctttcattgaagaacgcctgaaagaagacccgaacgcggaaatccggatattagagatcggagcggggacgggcgggacgagcgcggccgttttcaaaagattaaaagaggtcaaacatcatgtgaaagaatattgctacaccgatctgtcaaaggcctttttcatgcatgctgaaaaagaatacggtcccgacaatccgtatttgacttataagcggtttaatgtggaagagcccccggctttgcagggtatagaggcgggtgcatatgacgcggtaattgcggcaaatgtgcttcacgcgacaaaaaatattcggcggacacttcgcaatgccaaagcggtgcttaaaaagaatgggattttgctattaaatgagatcagcagccattcggtttattctcatctgacattcggtcttttggaaggctggtggctgtatgaagacgccaaactgcgtattcccggatgccctgggctgtatcctgaagcgtggcagtctgcgctggaaagcgagggatatcggtacgttacatttatggcggaatcgtcacatcacctcggccagcagatcgtggcagcagaaagcgacggcgtcatcaggcaaaagcagccggacgcgccggcggttgaagaaattgcggcttccaaagagccggctgatttcacagaaccgtctttctcagtcacagaccggacggtgcaattcataaaagaaacgttagccaagtccataaagcttgctcccgagcgcattcagccggaaaccagctttgaaaaatacggcatcgactccattttgcaggtgaattttatccgtgaactggaaacattgacgggcgagctgccgaaaacggtcttatttgaacacacgaatacgaaagaacttgccgagtatttgctggaaacttacccggataagctgcaacaggcattcggagccgatcaagcgcctcctgaaacggagcatccggaacctgcaatgaatgaaccggtgccgcttgtcacggaaacgcggcgatttatcactgaacaaaaagagccaaaagcgccaaagccggaaacagaaaccgtcaccgataatcgctcagatcgtgacgacattgccattatcggcatcagcggccgctatcccgagtctgaaaccctcgatgagctgtgggagcatttaaaagccggagacagctgtattacggaagctccggaaaacagatggaagtccggtcttctgaaaacgatggcaaaagaaacacgaaaagaagaacgcaaaacacggtacggcggatttctgcagcatattgacgcttttgaccatcacttgtttgacatccgggaagaccatgtgatggagatgacacctgagctccgtctaagccttgaaaccgtatgggaaacatttgaaaacggcggctactcgttagagagagtaaacgaatggcaggaatcagacagcggaatcggtgtatttatgggcagtatgtacaatcaatatttctggaatatcccgtcattggaaaaagctgcgctcagctctaacggaggggattggcatatcgccaaccgcatttcccactttttcaatttaacgggcccgagcatgggcgttacgaccgcatgctccagctcactgagcgccattcatctcgcctgtgaaagcctgaagcttaacagctgttccatggcgattgccggggggtcaatctcacgcttgaaccgtctaaatatgatgcgctcgaacgggcgaatttgcttgaacagggaagtgaaagcaaaagcttcggaaccggcacggggctgatgccgggagaaggagtcggtgcggtgctcttgaagccgctctccaaagcggttgccgacaaagaccatatttacggggtcattaaaagcagcgcgttgtgccatagcggcggaaggcagatgtacacggctccggatccgaaacagcaggcgaagctcatggcggcttccattgacaaagccggaatcaatccggaaacaatcagttatgttgaatcagcggcaaacggctctgtattgggagatccgattgaggtcattgccctgacgaacgcgttctcgcaatataccgataaaaaacgattttgcgcgcttggatccgtcaagtcaaatctcggccatttagaggcggcctccgggatgtcccagctcgcgaaagtgctgctgcaaatggagcgggaaacattagttccgaccattaacgcaaaaccgcaaaatccgaatatcgcgcttgaacaaacggccttttacctgcaggagaaaaccgagtattgggagcgtctgaaggatgccgagacgggagacatcgtaccgcggagaagcatgatcaattccttcggggcaggcggggcatatgcaaatctcatcgtagaagaatatatcagcccgaattccgatcaggcccgtcacggcgatgaggaatatattttccctgtgtcagcgaaaacaaaatggagttttgaagcctatcttgagagactggcggcctttttagaaaagacgccatctcttcatccggccgccatcgcatctgcgctgcaaaaaagaacgcatcatccggagtatcgggcggcatttacggctgcttccgttcaggaactgctggaaaaactggccgcttaccgcatggatcagcggaatctcaatttctccgattctgatatcggccggcgtgcgcggcaatgggaaaaaggagagaatatcacgtttgatcagttgcagcaagagcacgccgttcatctgccggcctacgcttttgaccacgggacttcttttcatttcggtgaatcagaaaacgctgccggcgttcaggcggtatacagtgatgacgacccatacgtgaaagggcatcaattcggcggagaaccggtactcgtcggcgctacatataacagtctggcagtcgatcatttttgtgacctttttcctgaagcggaaggaggacatattaaaaaactgaattacgtcagccccattaccgtaaaaaaaggcgatcacatcgagctgaaaacagaatcgaaacaaaacggggatggatttgaactgagcataatgcaccgcagccgcacgtctcctgattggagcatagcggcgtatgccgagtgcagcccgtatccgtttcaaaagcagcacgcagatctggcggccattcagcgctcttaccgggaagtgggccggatagatgagttatacggagatggaacgggaaccgtcgtgtggggagaagaatttaaaacgatcacccgtctgtacaaaggcactgatgccgttttagcgaaagtgaacctgaacaatagcgactcacaacaagcgcatcattatgccataaatccattaatcgccaacagtgcttacttggcctcgctttctttattggaccaaacagagacggaaagctatctgccgttcggcattaattccgtcaccttcagcagcccggaaaatcttaccgattgctggctgcacatcaagctggctaaacaaacgggggaaatgattctgattaacgcagatgtcatcagcagccgatcggaagtggtgatgcgttttgaaggctatgccctgaaacggttccgcccgaaaaccgaacagatgaatcagccggcccgaacggctgttaagaatgcgggagcaccgatttctgccggcagtctgacagatgatatccgcagctacgtccttggcaagctcgccaagatgatggatgaacccgcgtcatctcttcgttctgacgcgaatatcatggaattgggacttgattcagcgagtctgatcgggctgacaaaagagatcggccaagaggcggacatcgatgtgaatccaacattgtttttcgagtatccgacggcggaggagctgacccgccacttcgcgtcagcatatgagagcaagttttctcaattgcttgccgatcataggcattcagaagaggccggggtcacggaaacagaagagcgcactttaccgaagaaacagcatacgccttgtgaaaacgccgatgtcaagcaaggaatcgcgattatcggtatgtcagctcagtttccgcaatccccggatatccagtctttttggggacacatcgtaaacggggatcactgtattaccgaaattccggcggaccgctgggactggcgccgttacgccggcgatgagaatgacacgagtctcagatggggcggttttattgacggtgtcggcgaatttgacccgctctttttcggaatttctcctaaagaggcatcacaaatggggccggagcagtttctgcttttgatgcatacatggaaggcaatggaggatgcgggcctgacaaataaggcattatcaagcagaccgacaggcgttttcgttgccgcgggcaacagcgatccgaacaatggaacagccattccgtccatcattccgaacaggatatcatatgccttgaatttacaaggaccgagtgaatattacgaggctgcctgcacgtcaacgctggtggcattgcacagggcggttcaatcaatccatcataacgaatgtgagcaggctgtcgtgggcgccgccaatattctgcaatcgccgaaaggttttatcggttttgactcgatgggatatttaagcaaaaacggccgggcgaaatcgttccaaaaagatgccgatggctttgtcagaagcgaaggggcgggcgttatcatcatcaaaccgcttgaggcggcaattgaagacggcgatcatattcacatggtcattaaaggaacaggagtgtctcacggcggtaaaggcatgtcgcttcacgcaccgaatccggcgggaatgaaggccgcgatgaaaaaagcgtacgaagacaccgatgttgatccgcaaaccgtcacttatattgaagcgcacggcattgcctccgaaatggcagatgcgctggagtttaatgcaatcaaagcgggttacggcgagtctgcaaatcaagaggaaagcgcgccttgttatatcagcaccgtgaaaccttgcatcgggcacggcgaactcgcttccggactggccgcccttataaaagtagcgatggccatgaagcatcataccatcccgggcattcccggatttacagctgcaaatgagcaaatggttattcagaaaagccgcttccgtttcaccgaagacaatcaggaatggtcacagctcaccgaccatacgggcagaccgatcccgcgccgggccgcaattaacagctatggcttcggcggcatgaatgcgcatgtcgtcttggaacagtacagtccgagccataaagacaaagaatctgcgcatgacccgcagcttatcgtgctttctgctaagagcgaagggcgtcttaaggcggccgcaggtcagctggctgattttgtgcaaactggagatactccgtcactgcgggatattgcttatacgcttcagaccggccgtgaggcgatgaactgccgcttggcactcgttgcccgcaatcaagatgaattgctggaaaaactgaaagagtacagagcattttccgaagaaagcaatggaatgaaaagcttctttacaggcagtcagcagactggatcaggagatatcggcgttttactggaagggactctcggtacagtcgtcacggagacgctgttggctgaaaacaatctggaaaagcttgcattttgctgggtgaaaggagcggatataccgtgggacagactccaccaaggcaaatctgttcaaagagtgccgcttccgacatatccttttgaacaccacaagtattggaatggcggtcagccagaagacatcacccttgcgccggtttcccaggaccctcagctccgccgcgagagcgcagctgacattgtggctgacattttggggatgaaggcagcggaaattgatcaaaataagccgctgactgaatacggctttgattcaatctcctctattcagctgctgaaaaaacttgaggacggagacagccgcatcagtctggaagctcttcagaaatgcagcactcttcaggagatcggcatgctgttaaaaacgaaccagccgcatgaagcgggccggaattttcccgaactcgtcaagctgaatgaaagagaaaaaggccgtcctgttttttggtttcacggcggaacaggaggcgttgaagcataccagccattcgccaaaaagagtcagcgtcctttttacggcatccaggcaagaggtttgacagggaaagagccgctgcaaggaatcgaagagacggccgcttcttatatgagaatcatccaagcggtacagccgaaaggcccttatgacctcggcggatattccttgggcgggatgcttgcttatgaaaccgcgcgcctcttgcaggaggaaggtcatacagtaaaaagcgccgtcatgatcgacaccccgtacagtgaaaaatggaaagagagaaaaccatctgttaagtcagtcatgctgcaaacgatcaatacgatgcttacggcatatcttaagcctgaaaaccttgaagaggcattaatcagcagagaagacattaccgtccaggctgaggaagaagaagtattgaaagaattgatcggccttgccaaaaagcgcggtctgccaaaatccgaagaagcgatccggatgcagctggagcaaatgatgaagacgcagctcgcttacggaatggaagagtatgacatgaagccgctgcctcatccggaagcgctgcaatgctactacttccgtaataaaagcggtttgtttctcggagattttgaacgttatctgacagcagaggaagaacaaattccgttagaccatgatgcgtattggaaagaatgggaacaccagatgaaacactttcacctgctggacgtccactcttccaatcatgtcacaatgctgtcggaaccaaagccgcaaaacgccattaaggcattctgcgaaaaactgtacgcaaacaaaggaacgataagcgcaaatttccttaaatctttcaaaaaaaagctggacgaaacaaatgagttggtaaaacggtaatagagaacggccggagcaatccggccgctttttttacaatagaactaaatacactatgtactaaatattcactgttatattgatttcctgtttataagacattaaaaaacccccgataaacagggggcgatattaaaatctgacaggcaatgtttcaagccctctcaaaaacacgttttttctccactttacatcctcgtgcgcgcctttcagctctatattcggaaaccgttttaaaagcgaagtaaaggcaatggatgcttccatccgggcgagcggagccccgagacaaaaatgaatgccgaatccaaaagagatatgacggttcggtgttctcgctatatttaatgtatcaggatcatcgaaatattccgggtcccgattggctgaaccgatgccgataaatatcatatcgccttttttaatagaaacatctttataggtgaaatcttcaatcgcccatcgattcgccatcatgatgacgggagaggtgtaacgcaaaagctcttcgaccgccgtctggatattttcgggctgtcgctttatcttctccatctggtctttgtgcagaagaagcgccagggtgccggagccgagaaggttaaccgttgtttcaagcccggcaacgactaacaaaaacagcatggaatacagctctgattcactcagcttttggccgtcctcttcagcgtaaataagcttgcttgtcagatcttcagcgggatgttttcttttttcttcgatcagtgttttcatatattgtttaaattctttgagagcctggttggtcgcatcttgtccgctctctgacgtgtcgaccatcgcgtttgtccatacttgaaatttggcgcggtcctctttcggaattccgagcagctcggaaatgacgataaacggaagcggtgccgcgaaatctttcatgatatcagggtctgcttttgtttccatttcatccagcagctcttctgtgatctgctctatcccggtgcgaagctgctcaatcatccggggagtgaacccctgatgcaccaaagatcgaagacgtgaatgatccggagggtcttttgccagcatatgctctgagacaaaatcgatatcttcgctgacattcagcttcgcgatcagctccttcggcataacccgttttacatctctcgtaattctgccgtcttttaaaaacgccatacaatcatcataacgcgtgatgagccatgccggaaaggtgcctccgaaacgctgcagttcgaatttatgtatggggtcctgctctctgaatctgcttaaaaccgcaaaagggtcttcgtgaaactcgggtgagtgtgggtgaaacattgttttttccatctggatttccccgccttcatgtttttgaaaagacataaccaacagccggtgcctgccgaccggacggcattcctccttttatctgccgaagacactgatcacaacggctcataagtatgtctaaaatatataaggaaaaagaagccggttcaatagacaaatcgtaaagccgccattttcgttgattatcaacaaaacagcaaactttttttgccatttcatcatgtgtgttaaatccggctaatatacatatttacgcttcatatcaacttcttaaggaggatgtgaatgaatgcgtttatgaaatgggcggcaagtctgcttttggtgatctctcttcagttcggccttacgggcgccggcatccattcggacagtgctgctcatgctgcatcccgatacgatcaggtgctgtatttcccgctgtcaaaatatccggagacgggaaatcatataaaagacgccatttcggcaggtcattctgagatttgtacaattgatcggggcggagcggagaacagaaggaaagaatcattgaaaggaattccgacaaagcccgggtttgaccgtgatgaatggcccatggcagtctgcacagaaggcggggcgggggctgatatcagatatgtaaccccatcggataaccgcggggccggttcatgggttggaaatcaaatgagcggctattccgacggcacgagagtattatttatcgttcagtaacttctccggttcgccggagtttttttatgctttgaaaaagcggcacgccggctggacatatgaaatggcaaagagtaaacttatatgttggaatcagcatgagaaaggattggatcacattgacagtgactacataccgaaatattgcacttttacttctttgtttaacagcgggaattgtggatgtgatcggttatttaagcctgggacatatctttaccgccaatatgacggggaacatcgttctgttcggcctggcgatcggcaactcatggcaccttgccgtactcaaatcgttaacctcgttaatcggatttattgccggcgttattgccgcggccctgcttgtgggcaataaaaagaaatcattctggccccctgcggtaactgccgctttagctattgaaggagctgttttgctgctgtttgctttgttctcctgcttttttgcagacgccatttctgtttatgtgctgattatgctgctcagcttcgcaatgggaatgcagacgacagccgcgagaaaacttggtgtagcggggatttccacgaccgtattaacgggaacgctcgctaatttttttgaagatctcaccgcaaggttttacaaagcggacaagcggaagcagtttacgagagatgctgtattgcgcgcgcttgccttggttctgtattgctttggggcggtcataggcgcttttgccgaaccggattataagtttgccgtgatctggctcccgattatcattattttaggcattatgctttgcgcattcacgatgttccacggatattctgaagaaaaaaaccaataaaaaacgccgctgtttcacggcgttttttctttttattgctctttccgggtcccgattgtatacacggcccgatctgtatgtacctttaatccgtcttgctcctgttggatggtaatgtcgccgagcagaggaatttcatacgcatcttggggaagcgggacatttccttcctccgtataggttgtgccgtgcccttttaagacgagttcttcatccgctacatagtcatcgggatggtttgtccggcggacgagaacgtcatcaaggtgaagcatgatctgatccatatcagaaatctcgtttcggctgtctgtcagctctccttttctgatatcaagcgtttgtccgatctgtttttgcagccattcagacaattcggtgtttgtaagtgccattgtgattcctccttttatctacaccatacttattccctatttttttagaaatacactgccttgcgttgatctttttttctgacagccggttctgacctgttccgagttccttcattataaatgtttcatctattcacctgaaaaacggagtcatctgccggtgcagacgaccccgttctcatgataaaaaggttactctttcggcacggcgttttcggcgttcactgcgcccgctccgtaaatgttcggatcttcatttgtccattgatccggactttgtctgatcaatgttttcacttcgtcaggcgaaagctgcgggttttgctgaaggattaaggcagcgatgcccgcacagatcggagtggccatggacgtgcccgacagactgaaatacaaggagcctactcggtttgatttctgtaatttgtcaagatatgaacgcggagaacgaagagatacgatatcgaccccgggcgcaagaatgtcaggcttctcttttccgtacaccgtcgggccgcggcttgagaaagaagcgaccgtatcgtcctcattgctggctgtatcattgtcatcataggcgcctaccgtgatgaccttctcgctgacaccggggcttgaaatcgtttgagcttccggaccggagttgcccgcggcgacgcagacgacgattccttcattccatgcctcttcaacggccttgacgagcgggtcgtccgtttctttatcatatttgagcgcatctccgcccagcgacatgctgatgattctgatcggattctttgtgtgttctttattatattgtatgcaccattccacaccttcaatgatatcagccaaggttcctgatcctgatttgtttaaaaccttgactccgatcagatcggcttccggcgccggcccctgatatttacccgaagatgaagcgccgctgcttgcgatatcaccggcgcaatgggtgccgtgtccgttgtcatcatacggttctgtcttttggttgacaaagtccgcaaagccgataatcctgccttctaaatcaggatgctgatagattccggtatcaataacggcgacggttacgccttttcctgttaatacggtgccgttacgggtcacttcttttgcatgagacgattcagctgctgtatcaaggagagcttttacttcacggtttaaatagattttacggatatcccggcattgcgaaagaagcatgtgaagggcggacggcgtgacttcggcgctgcagcaattgattgtttgaaactgcttttttatggtgcagcgtttttcttttgataagacctgtcctgtgctgtgaaaaccggattcatggcagccctcttcaaattcaatgatgactgacattttctttctgtttttcacctttttttcgaaaaaattgtgtaaaaagcaaggtgtccatttgaaaggtttatataactgtaatacgttttctctgagcggccagtccagcttatgagcatttgaccgcaccatttgtaccattgagtaaccaaacatatatacttttcctcccattctggcgattctctctataccatatgaacaggccgtaagttcggtcagtttgtttgtccttcaggagcgctggttacttgcggctttttcaggagaagaaatcgagttgaaacggaacgtttgttcgttttgtaatgaagccggcggaaggtagtatatacatgaacatcatattgagacattccttggaaaaacagcttccgattgatattatatatatgaataaagagacggctccgtttcaaaacggaccattatgataaaaaaaggggatgagcgggctgtaatggcattttgctgtacaaaaaggcagatgagaacttttttgacgggctccattctgtcctgcgcatttgcttcgggaggcggatattcatttctaaaagcgtattcttgatgccgtccgtttccggccgtgaatctcccgcccctgaaaattcgggcgttcctccctttttttttgccctctctcaaccttttttcactgatgcccggcatttgagcgcttgaaccgtgacaatccattgatttttcgaaaccgggaagtttttcactgatgataatgttaatagaatgttaagataagacctattgacaaaaatccatataatgaatatttcatttttcagaaaggagcaaagaaggagagctgatgaaaagaattttacttaatgtcatcattatcgtagcaatggtcttactaataagatgtgctcattatgcgtcagaccctgatccctcgaattcttctgatacatacacagattttaaagatctggctgaacatgaagaccccgatgattatcatatatcgtacaataagagaaaggggagccccgtattgatcatgtccccgcacggagggagaattgagggcggggtgagcgagatcgtccgctctttcagggatgattattcaacctacctgtttgagggattaaaagcgcatgataaccagactcttcatattacgagcaccaagttcgatgagccttcagcagtcgaaagcattaagcagcaccattatgttatcgcagttcacggttataaaggcgacgagaaaaatactcttgtcggaggaagcgaccggaagcgggcgaaaaaattggtgagagctctcaaacgaaacggatttcctacagaattggcaacctcaaaaaccggtctggccggggttgacaccgaaaatatcaataaccaggcgcaaaccgggctgagtatacagcttgagatcagcagagaacagcgggaggcgttttttgataattttgattaccgcgaaagggaattcacaaaaacggaggaattttaccggtttgtccgtacgataaaaagagtgatcaatcaagagtattcgtgagcttaaaaaaagacaaaccagtgaaaggtgagtaaactgaaaaaaaaggaggtttgtcccttggcaaaacatcacttttatttaaaagcaaattggcccggaaatcgcaatgacgtcggcgatattaaaagcggccggctggaaaccgctgtgtccattcctaaggaaatggacggacccggagaaggcacaaatcctgatgaaatgctgcttggagcggccgcgacctgttatattataacgcttgcggcgatgatggaaagaagcggcctggataaagaagatctacatatggaatctgaaggaattgtagacgtcacgaacggtgtgttcacgtaccagaaaatcattcaccgcccgtttatattattaaagccggatgcagccgaaacggactttacgctcgccaggaagttagcgcaaaaagcggagtcctcatgtatgatttcacgagcggtccaaggaaacgtggagatggagcttgaggttgaagtaaaagctgcccgcgcttgacgagttcaaacggtcagctccgggccgtttgattttttttagctttttgagacttggaacggttcagcaggatgacgcccgtgatgacaaaaataagcccgatcatcattttagctgtcatggcttccttaaaaacaaaaaagccgacaattgccgttaaagccgtgccgacacctgaccatgtcgcgtatgcggcggataaatcaaggcttttcaaagagaagctcaaaaacataaaagaggctccgattccggcaatgacgccgagagcgggccataagtgcgtaaaaccgtccgacagcttcagcatcgtgcttccgaacacttctgatacaatggctaatgccaggcagagtaatcctttcatatcatgcttctcctttctaccaattcatcagaatgacaccggccaataagaatacaagtccgatgacggcctgcttgtccagtttttcatgaaaccatttcgctccgataatggatgcgagcaccgttcccgctccgctccatgttgcataggataagctgagcggaatgagattcagtgtaagtgaaagcatataaaaggccaatgaatagcctgccactacaagcgcgctcggcaaaaaccgcgtaaatccgcgggagaccttcagcatggccgcgccgattgactctgataaaatagcaattgtgaggaagatataacccagaatcatatcaaatccccctctcatcataatccttatgccttttgtttaaggcagtaaaataaaataatatccgaactttgcccgccaagtcaagacattaggcctatataaaaaggcccctgaaaggagccctttttgattgtcttagtagtaatacggatagtaagggtagccgtaacctccgtacaggtacggattgaataaagcgcttccgacaagcccccgacaagccctccgaagaacggtccgccgtaaaaaccaaacggccgtccgaatccataaccaaaccaaggccggccaaatccaaaacccggccgcccgaagccgaagccgaatccgggccgcccgaacccgaagcccggccgtccaaacccaaatccgggccgtccaaacggtctcatatcactatctgctgcatatgtgtattcttcattcataatttaggtacctccaagaataaatttgagatgataacagagtattcagcccaccaatttttgattgggcatttatcaaaaaaataaaggagtgagcttttgtgggcctgtatcagtccgattggtcaaaaaaacctccgcacacacacgcataccgggctgttacggatgtagtgcaggggcactaccatatgatcgaaggcttttcgcagccggagaacggcagcaatacagatgagcatacacatttctatacgggcatcacctcgtttgaaaacggccattttcataggtattacggcatttccggccctgccatcccgagggttgacggaacacattaccatgagctttcagagaccacctttgccgcctacaatgagccgattcggatccagcatggcggcgtcgtttacgatccgcgggaggaaggacggaaaacgcaccgccatacgctcaaaggaaaaacgagagaggttgtcggaaacgagccgatcgggtggtagcggacgtttagcgctcaggaaaaagggcaaaatggataggtgcctgaagaaatgaatgctataattagggggagatttataaaagagagtgatacatattgaaaaataaaaaacagcctgtcgtcatactcgtcggaccgacggcagtcggaaaaacaaaactaagcatcggactcgcgaaaatgctgaatgcggaaatcatcagcggagattccatgcaggtatataaagggatggacatcggaacggccaaagtcaccgaagaagagacagaaggcgtgccgcatcacctgattgatattttggagccgtccgacactttttcaacggcggattatcagaaaatggtgaggggaaaaatcaccgagattgccggtagaggaaagctgccgatgattgtcggggggacgggtctgtacattcagtccgtgctgtatgactatacgttcacggaaaactccggcgaccctgtattccgggagcgaatggagaaactggcggctgaagaaggggcggaagcgcttcatgccaagcttgcggcagccgacccggaagcggcggcagccattcatcaaaacaatacgcgaagagtcatccgcgcgctcgaaatcctgcatgtatcgggaaaaacaatgtcagagcatcttaaaacccaaaaacgggagctgctttacaatgcggttcttatcggtcttacaatggacagagaagtactgtacggccggattaacgagcgcgttgacctgatgctggaaaccggccttcttgacgaagtaaagcggctgtatgatatgaatatccgggacagccaatcgattcaggcgatcggctataaagagctgtatgaatatcttgatggaaaagtgccgcttcctcaggccgtggagcaattaaaacaaaattcaaggcgatatgcgaaacgccagctgacctggtttcgcaataaaatgcccgtttcatggacagatatgacgccgcctgttgatattgagcagaaaaaaaaggaaattttcgagtgcatagcaggaaaactggaaatttaatcgaaacagtattgtattgagaaccaaggaggacgaaacatgaaaccgattaatattcaagatcagtttttgaatcaaatccgaaaagacaatacgttcgtcacggtgtttttactcaacggctttcagcttcgcggccaggtaaaaggctttgacaactttaccgttttgctcgaaacggaggggaagcagcagcttatttataaacatgccatctccacgttcgccccgcaaaaaaacgtccagcttgagcttgaatagactttttgacaaagaccatgaacaatggtctttttctatgcgcgtctgtatattgcaggccgtatatcggaaagataaaagggggttcggaaaatcgtgttcgaaagtgaaaatgaactgagaagaatcaggattacgctcgtttggatcgctgtttttttgctgtttggagcttgcagcaatcacgagacggtggtgacggatgatgacggcggcttggcggatgccgaatcgcagacagaaggcatggtgcagctggaacataatcgtttcggcattgtcgagggcggttatctaaaaatataccgctatgatgaaaaaacgaataaaatcgaactgaaaaaagaaacggcgctggatgagcttgaataaatttcacaagcgttcgaatttacaaagcgggccgcacaagctacactaagtactgacattgatcatgcagagggtgagacgattgaaacacaaggtgataatcaaccattgggaagaaacttgtgaagatgattcctgctatgaatatggaaccagcatcatcgttgacggcaaagaactgatcagggaggcttccatcacaagcgctctgaaagccgtactgaaagaaatcggtgctgatgtagagattgaagaaaccgttgaaagcgaaaaaaaatgtgattcttacaaaaaataagaataaaagtctagactactaagcagttttttttcatgttatgatagacatcggcttacacatgacaccttgagtaggatgagagatgattctcgttctgctctcttttttgggcgttaatcgggccggagccaaagtccgctctttcaaaaatatgaattttttataaatcgatctcaatatgttgtgtttttctgagaggttagtatactatatatagtgttaagagattcattatttttgataggtcgtgataaggatggttcaaatcatatttgattcaaagacagggaatgttcagcgttttgtgaataaaacagactttcagctgatccgcaaggtggacgaaatggaccacgtggacactccgtttgttttggtcacctacacgacaaacttcggtcaggtaccggcatcaacacaatcatttctcgaaaaatacgcccatctcttattaggagtcgctgcgagcggcaacaaagtatggggcgataactttgcaaaaagcgccgataccatctctagacaatatcaggtgccgatcttgcacaaatttgaactcagcggcacatctaaagacgttgaattgtttactcaggaggtagaaagagttgtcacaaaatcaagtgccaaaatggatccagttaaataacgaaatcatgatccaacaagatggaaaattccagtttgataaagataaagaggctgtacatagctattttgtagactatatcaatcaaaacacagttttctttcacgatttaaaagagaagctggattatttgattgaaaaccaatactacgaagaggaattcttaagcctttattcttttgaagacattaaagaagtgtttaagacagcttacgctaagaagtttcgttttccttccttcatgagtgcgtttaaattctataatgactatgctttgaaaacgaatgacaagaaaaaaatcctcgagcgttatgaggaccggatctcaattgttgcgctgttcttcgcaaatggcgacactgagaaagcaaaagaatatgtgaatctgatgatcaatcaggaatatcagccgagcacaccgacatttttgaatgccggcagaaaacgccgcggagaactggtgagctgtttcttgctcgaagtcaatgattccttaaacgatatttcacgggcgatcgatatttccatgcagctttctaaactgggcggcggtgtttctcttaacctgtccaagctccgcgcgaaaggtgaagcgattaaagatgttgaaaacgccacaaaaggtgttgtaggcgtcatgaagcttcttgataacgcgttccgttacgctgaccaaatgggccaaagacaaggctctggcgcggcgtacttaaacattttccaccgcgatatcaatgactttcttgatacgaaaaagatttctgcggatgaagatgtgcgcgtcaaaacgctttctatcggtgtcgtcattccggataagttcgttgagcttgcacgtgaggacaaagcggcttatgtattctatccgcacacgatttataaagaatacggccagcatatggatgagatggacatgacggcgatgtatgaggagcttgttgacaacccgcgtgtcaaaaaagaaaaagtgaatgcgcgcaaattgcttgaaaagcttgccgttctccgttctgagtcaggttatccgtacattatgttccaggacaacgtaaacaaagagcatgcgaataaccacgtatcaaaagtgaaattctcgaacctttgctctgaagtgcttcaggcgtcacaggtttcggcttacacagattatgacgaggaagacgaaatcggcctggacatttcctgcaaccttggttcattaaatattttgaatgtcatgaaacataaatcgattgagcgcacggtgaaactcgcgacggattccctgactcatgtatctgagacgacggatatccgcaacgcgccggcagtcagacgcgcgaacaaagcgatgaagtcgatcggtttaggcgccatgaaccttcacggctacctggcccaaaacggcatcgcttatgaaagcccggaagcaagagattttgcgaatacgttctttatgatggtgaacttttattccatccagcgttcagctgagcttgcgaaagaaaaaggcgaaacgtttgagcattacgaaggctccacttatgcaacgggagaatatttcaataaatacatcgaaaaagagttctcaccggcatacgaaaaaatcgctgcgctctttgaaggcatgcacatcccgacaatcgaagactggaaagagctgaaggcgtttgtcgccgaaaacggcatgtaccacagctacagactgtgcatcgcgccgacaggctccatttcctacgtccaatccagcacggcgtccgttatgccgatcatggaacggatcgaagaaagaacatacggaaattcaaaaacgtattacccgatgccggggttagcgtctaataactggttcttctacaaagaagcttatgatatggacatgttcaaagtggtggatatgatcgcgacaatccagcagcatatcgatcagggaatcagctttaccctgtttttgaaagatacgatgacaactcgtgatctgaaccgtattgatctgtatgcccaccatagaggcatcaaaaccatttactatgcaagaacgaaagataccgggcaggacagctgtctttcttgtgtcgtttgattaaaggagagttaacagtgacaaaaatttatgacgcagcaaactggtcaaagcatgaagatgatttcacccaaatgttctacaaccaaaacgtaaagcagttttggcttccggaagagatcgcattaaacggcgatcttcttacttggaagtatttgggtaaaaatgagcaggatacgtacatgaaggtgctcgccggcctgacactgcttgatacagagcaggggaacacaggcatgccgattgtggccgagcacgtcgaaggccatcagcgaaaagcggttcttaatttcatggcgatgatggaaaacgcggtgcacgcaaaatcatattcaaatatttttatgacgcttgctccgactgaaacgatcaacgaagtatttgaatgggtaaagcagaataaatatctgcagaaaaaagcgcaaatgattgtcgggctttacaaagccattcaaaaagatgatgaaatttcactgttcaaagcgatggttgcttctgtctatctggaaagcttccttttttacagcggtttctattatccgttatatttttacggacagggaaaactgatgcaaagcggtgagatcatcaacctgattcttcgtgatgaagcgatccacggtgtatatgtcggactgctggcccaggaaatattcaataaacaaacagaagcgaaaaaagcggaacttcgcgaatttgcggttgagcttttagaagagctttatcacaatgagcttgaatatacagaggatctctacgaccaagtcgggctgtctcatgacgtaaagaaattcatccgctataacgccaataaagctttgatgaacttagggttcgatccttactttgaagaagaggatattaatccgattgtattaaacggattaaacaccaaaacaaaatcacatgatttcttctccatgaaagggaacggctacaaaaaggcgacggtagaaccgattaaggacgaagatttttattttggccaagatgaagagcagatataatatctgctcttttggcttgagtggagaggtaagacaggaggaacgggcatgaataaaatggatgaaatcatcttggctgcaccgcggagtgacgtctttcaaaacgaaatgctgacatttcagggagtcaacagcgaggatgaacgtatcataaaaattatggctcaaattgaggcgcatttttttgaaatcagaagaggcgacgcggaagaggacccgcgatttaaacagccgattccgtatgtcgtcatccgccgcgatgatgaggtatttgtgtatgaacggctcgcgggcggaggggaatcgcgcctccataataagctttctctcggcttcggcggacacatgaaccctatggaaggggcggcttcatttttggaagtgctgaaacagaacaccgaccgggagctggcggaagaattgtacattcgcgaggaggacaaacaaaacattgtcacactcggcctgatcaatgatgatgaaaacgatgtagggaaggtgcatatcggcatcctttctgcgctccagttagcgcctgcagcacaagtcgaagtgaaagaaaaagatcaaatcgccgggcgctggatgaaactgagcgaactgaaagaggaaaatgtgtatcatcgtcttgaagcttggtctcggtttgtcgccgatatacttcaataacaaaaaacccccgttcgtcccaaaaagggagagcaggggttttttcatttagtcttgcacaatgaaggcatcaaatccggctttttcggcccgcgctgccaacgcttcagcataatctctgaaagagaatgcgccgatctgcactttaaataagccgccttttggaagcacaatcgcgtcaaaacctttagacaccgcatcggcggcaagcgcatcagcatttgctttcacgttgaatgcgccgatttgcactttatataagtcagcctttttttttagaccgaaagcttgctccaagcccttggcatgtcctcttgcaaggctttcaataaaactggctgttttcagtttgtttgcatcagctgacgtatcaacaaaaccattctccgtcaaaatcgccggcatccttgtctcccgcagcacatggaagttggctgttttttttccgcggtcattaaaacccgatgcttgaattacttgcgtgtggacggctgattggtaagtcgaggtcggcgctccgacaccggggtaaatatagctttcgaatccggttccgcctcctgagttaatatgaatggataaaaaataatctgcgccccagctgttggcggcatccgttctttccgtcaggctgaccgtcttatcgcttgtcctgctcatcgtgacagaaactccttcatactcattcgtcagaatcgtgcgcaaagccagtgcgatctccagcgtgaccgctttttcctgaagtccgtttccggttgcacctgaatcagttccgccatgaccggggtctataaaaattttaaccattctccatcacctcattacagcatatgatgatattcaaaaggtgcttgtacggctgtcattcatgaaaaaaatgagaaatacacccaacatttcccggaaaataaaaataaatggtttgtcctcccgtttttgctgaatacaataagaaatgaaaaatatttctcgggaaagcgcaggattcaacatcattcccgaagagaacggaaaaagtgacagataaagaggaaaacgggcctcatgatgataggcggatgtcacagaaccgcttcatcatgagtaagataaagagagaacagagaggtgagcatgttggagcgcgctgtaacctataaaaataacggacaaattaacatcattcttaatggccaaaagcaagtgctgacaaatgcagaagctgaggcggaatatcaggccgccctgcaaaaaaatgaagccaagcacagcattctgaaagaaattgaaaaagaaatgaacacattagtgggtatggaagaaatgaaacgcaacattaaagaaatttacgcgtggatattcgtcaaccaaaaacgggccgaacaagggctgaaagtcggaaaacaagctcttcatatgatgttcaaagggaaccccggcaccgggaaaaccaccgtcgcgagactgatcggcaagcttttcttcgagatgaacgttctttccaaaggacatctgatcgaagcggaacgtgccgatctcgtcggtgaatacatcggacacacggcgcaaaaaacgagagatctgattaaaaaatcgcttgggggcattttattcattgatgaagcatactcacttgcaagaggcggagaaaaggatttcggtaaagaggcgattgatacgcttgtcaaacatatggaagacaaacagcatgaatttattctgatcctggcagggtactcgagagaaatgacacatttcctgtcattaaatcccggtctgcaatcgcgcttccctatcagcatcgattttccggattactctgtcactcagctgatggacatcgcaaagcgcatgatagcagagcgggagtatcaattaagccaggaagccgagtggaagttaaaagattacttaatgacagtgaaaagcacgacaagccccattaaattcagcaacgggcgctttgtcagaaacgtgattgaaaaatcgatccgcgctcaggccatgagacttttaatgggagaccaatacttgaaaaacgatttaatgacgatcaagagccaggatttacttataaaagatgaggcggcagctcacgaatagacctctcagccggtttgaggggtctcttttttatttctctctttaaaacccgccggatgtgtggtatacgccctgcgggtttggtatgatagtactactgcccaatacgacacagaaaggaacatccatttgaacgaacaggaaggaaaaaaagaaacggtcattttggtcggctgccagcttccgcacatgacagatgagcactttgaacattccatggaagagcttgcttcattgacaaaaacggctgacggaacggtgctgacccggattacgcaaaaacggaacagagcggatgccgctacatacataggcaaggggaaagtagacgagctgaaggcgctgtgtgaagagcttgaagcggatctggttatttttaatgatgaactgtcaccgagccagcttaaatcactcgccactgcaattgaagcgaagatcatcgaccgcacgcagcttattttggatatattcgcaaaaagggcgaagacgagagaaggaaagcttcagatcgaattggcccagcttcaatacgcgctgccgcgtctgagcggacaaggaatcaatctctcaagacaaggcggcggaatcgggacgagagggcccggtgagacaaagcttgaaacagaccggcgccacattagaaaccgcatacacgaaattaacgtgcagctgtcaacggttatccgccacagaagccgttatcgggagagacgcaaaaagaacggcgtgcttcaggctgcactcgtcggttataccaatgcaggaaaatcaacgtggttcaatcaattaacaagctcagacagctatgaagaagatctgctgtttgcaacacttgatccgatgacgagaaagatggcgctcccaagcggctacagcgtccttttgtctgatacggtcggcttcattcaggatctgccgacgacgctgattgccgctttccgttcaacgcttgaggaagtgaaggaagcagacttgatcattcatgtcattgattcatccaatgaagattatgccgggcatgaacagactgtcctcggactgttaaaagagcttgaggcagatgatattccggtgctgaccgcttataacaaacgtgatgagacacttcctgacttcatcccgacagcgggagaaggccacatcatgatcagcgcccgaatcgccggggatgaagcgaaactaaaagcggaaatcgaagcttatttgcgccgggagctgatgacaccgtatgaagttcatgtgcctgccgccgaaggcaaattgatgtcacgcatcaaatcagagaccatgatcgacagcctttattttaatgaagaaaatgaacgctacgaagtctcaggttatgtacaggaagaacaaagcatactcggagaattgaagaaattcatgtaaggaaggtatacacaacatgtttgacacactgacccacggcgctcttttacaaaaaaccgccgaagaaacagaagcggaaatctccgccgttcataaaagaatagaagaaatcagtgaacggaatgaatggagagtcctgcaaagctacagaaaacataaagtaagcgatacgcattttacgccttcaaccggatacggttatgatgatatcggacgggatacactggagaagatctatgctgatgtgttcggaggagaggagggacttgtgcggccgcaaatcatttccggtacgcatgcgatttcaatcgcgctcttcggcgtgctgagacccggggacgaattgctttatatcacaggcaagccttacgatacactcgaggaaatcgtcggagtaagaggcggggagtattcaggctcgcttaaggaatttcaaatcggatacaatgcagtcgatttaacatcagaaggcagagtggactttgaagcagtccgggctgcaatccggccgaatacaaaagtgatcggcatccagcgttcaaaaggatatgcgaatcgtccatctttcagaataaatgaaattgaagagatgattcgtttcgtaaaggaaatcaaagaggatgtcattgtttttgtggacaattgctacggagaatttgcagaagagcgggaaccctgccacgtcggagcggatcttatggccggctccctgattaaaaacccgggcggcggccttgctaaaacgggcggctatcttgtagggaaagccaagtggattgaggcctgctcttaccggatgacctccccgggaatcggaagtgaggccggtgcttcgctttattcactgcaggaaatgtatcaaggtttctttctcgctccgcatgtagtggcgcaaagcttgaagggagcggtatttaccgcccgttttcttgaaaagctcggctttacgtcaaaccctgcatggaatgcgccgagaacggatctgattcaatcagttgagtttcaggaccctgataagatgatcgctttttgccaggcgatacaatatgcatcaccgattaatgcgcatgtgacgccttatccgagctatatgccgggatatgaagacgatgtcattatggcagcgggcactttcgtacagggagcaagcattgaattatcagcagatggacctatcagaccgccttatgtcgcgtatgtccaaggaggattaacctacgcgcacgtgaaaaatgcgatttgcagcgccgtaaatgctttaatggaaaaagagctgatttagggcgtttgcaattttcaaagaatttgatgttaagattccttacattgtgttgacacaaaatataacatcacctataatgagactaagataagaaaaggaggaaattgagatgagtgataacattcgccgctcaatgcctttatttccaattgggattgtcatgcagttaacagaactttctgcccggcaaattcgatattatgaggaaaatggattgatatttccagcgagaagcgaaggaaatagacgattattttcattccatgatgtagataaactgttagaaatcaaaaatctgattgaacaaggcgtcaatatggcggggatcaaacaaattctggataaggcatctgccgaaccggaagaaaaatccgaaaaaaccgccaaaccgatgaaacacaatctgtctgatgacgaactcagaaagcttctgaaaaacgaactgatgcaggcaggccgtttccagcggggaaatactttccgccaaggtgacatgtcccgattctttcattaatccgttagcaactgttttgctatatacatttaccttttagaggaggagttttacgaaatggcaaagtacacaagagaagacatcgtaaaattagtaaacgaggaaaacgtaaagtatatccgccttcaattcacagacattctcggaacgattaaaaacgtggaaattcctgtgagccagcttgaaaaagcacttgataataaatgcatgttcgacggttcttccatcgaaggtttcgtccgtatcgaagagtctgatatgtacttatatcctgatctgaacacatttgtaatcttcccgtggacggctgaaaaaggtaaagtagcacgcttcatctgtgacatttacaatccggacggcacgccgttcgaaggtgacccgcgtaacaacctcaaacggattctgaaagaaatgaaagaactcggtttcagcgatttcaatcttggacctgagcctgaattcttcctgtttaaattagatgaaaaaggcgaaccgacgcttgaattgaacgataaaggcggatacttcgacctggctccgactgacttgggagaaaactgccgccgcgatatcgtgcttgagcttgaagaaatgggctttgaaatcgaagcatctcaccatgaagttgctcctggtcagcacgaaatcgattttaaatatgccggtgccatccgttcttgtgacgacatccaaactttcaaactggttgtcaaaacgatcgcccgcaaacacggtctgcatgcgacattcatgccaaaaccgctgttcggcgtaaacggttccggtatgcactgcaacctatcactctttaaagataacgttaacgcattctttgataaagacgctgatcttcagctgagtgaaacagcaaaacatttcattgccggtatcgtaaaacacgcgacaagctttacggctgtcacaaacccgacagtgaactcttacaaacgccttgttccgggctatgaagcaccttgctacgtggcatggagcgcgcaaaacagaagcccgctgatccgtatcccggcttcccgcggcatcagcacgcgtgttgaagtccgcagcgtagacccggcggcaaacccgtacctggcgttaagcgtattgcttgcagcaggccttgacggaatcaaaaacaaacttgaagcaccggctccgattgaccgcaacatctacgtcatgagcaaagaagagcgcatggaaaacggcatcgtagatcttccggcgacactggcggaagctctcgacgaattcaaatcaaacgaagtcatggttgcagcgctcggcgagcacctgttcgaacacttcattgaagcaaaagaaatcgaatgggatatgttccgcacacaggttcatccgtgggagcgcgaacaatacatgtctcagtattaatctctcaatcccttggcactattggtgtcaggggattttttaagttttggtcaaaaggttaagaggtcgatattttggtccttgaccaaaaaaaatgaagttatgaatctaactccataattgaggacacgtatttattgtaatcccttattcggtttaggatggaggctaaatgaagccaattatgctctaaaattgaaccggccatttttattttcaaaaagcaggagcaggaaattcatcaattttgatacgaagtaaactataaggtttctgtcgtaagtcttctccataatgaaaactagcctgccgatgtaattggttcacgatgacgtataagtatccatccggaccaatcgaaaaagtatccggccataaaattctcggatcatgtgcgatggtttccattgtgccattcggcagcatctttcgaatactattgttctcgtaatctccggcataaacggctccttttgcatctgtaatcattccatcagacgcgcctttttctccccaatacgccacatgataaagtaaatccatgtccgatatatttctatctctcagggcttctgttgagatagagaacaaatggcggctggtcaggggacaaaaaaataatacctttccgtcgggagagatcgcaataccgtcggatgccagcctaaatggggaagttgaaccatccttgttacgattcatcaaaattttgccttctactttcggtataaaagaggaatccggtgaagttggatttgctccatttaaccgtctaaatgcgtttccggtttctaaatcaacgacgataatagctcctggtcctttggaagaagaatccgttatataggcataacctgcagttccgacacgaaaatcaaatcggacatcattcaggtaggttgttggaaggacaacatcttctgtaaaggtatacactcttctgattgtattggtttttaaatcaacagcgactaattttgccccgcctttaattggttcagaaaaattgggcgccgctgtatctagtatccaaagcgttcctcttccatcagcaactacactttggacactgatgaaagtcattttgatattctcaaagttaaccaaattggtttgtgaatcaggataaggctgcaatttatctccaattatttccgctgccgtaaatttaacatcgtctccccatttcggaaaacaaatgaatatacgaccggtttctgagacagtaacaccggtaggcatagctccataaaatgcataaaccagttctaaatcaccaaaatatttttcaaaaggcagcataggtttcataatatcctcctcaaccaattaaacgggatatcacttatatatgattcgcattttttcaagtgcatgtttcttaataagtttttctaaacaaaagatgatggaagtgcttatcatttaataaatcagtcaggtgacacatagggtttttacttaacgtctgtcgaaggagccggcaattacaacatggtatgtcctttgatcggttttaaattttctgaaaaaagagttgaaaaagcagaaaagattttataatatgaaatcaagttagtttgttcgatcaacaaactaataaaccgctttaattgtccttcatgtaaaggtcttaaatggaaggggataagaggctcgatttaattggaggtatatataaaacgaaagccaagcttttatcctgttcactacgatgaaagtgctctgtgaaagtaaactgctatcattttttgaaagcgcttttataaagacctcactggccgataaaattgaagaaatgttataccattcatcatgttccttatgtaaaggatcgaaaaggggaggaaatcatgctcagtgaaaatgtaaagaagatcagcatggttgaaaaagttggatatgcgtctggagattttgcatgtaatttaatttatgcaacagtgtctacttatcttttgttcttctatacagatatatttggtttaccggcagcaacagccggtacgatgtttttagtggttagaatcatcgacgctctcgctgatccttttattggaacgatagtagacagaacaaatagcaggtttggacgcttcagaccgtatcttttattcggagcttttccatttgtcatactggcaatactctgttttacaaccccggatttttcggatattgggaaattaatatatgcctatatcacctatgtcggtttatcgcttacatacacaatgataaacgtgccatatggcgcgttaacctctgcaatgacccgaaataatcaagaagttgttagtataacgtctgtccgtatgttatttgcgaatcttgggggacttgtcgttgcattttttgttcccttactggctgcttatttaagcgatacgtccggcagcgaatctcttggctggcagctaaccatgggtattatgggagttataggcgggtgccttttaatcttttgttttaaaagcacaaaagagcgtgtcacgcttcaaaaatctgaagaaaaaattaaattatcggatatatttgagcaatttcgtgttaatcggcctctagttgtactaagtattttttttattattatttttggagtgaattcaatcagtaattcggttggcatctattacgtaacgtataatttagaaagagcggatttagtgaagtggtacggtttgttgggaagtttgcctgctttggtcattttaccgtttattccaaagcttcatcaattattagggaagaagaaattactaaactatgcattattactgaatatgatcggcctcttagctttactgtttgttccgccaagtaatgtattcctgatactttcctttcgattgctggccgctgcaggaagtctcactgccgggggatatatgtgggcgcttattcctgaaacaatcgaatatggagagtataagaccgggaaaagaatgggcggtctcatatacgctattatcggatttttctttaaattcggcatggccttgggaggggttgtaccgggtttggttctagatcagtttggatatgtggcaaatcaggcgcaaacgccggaggcattgacgggaattttaattacagcaaccattattcccgtgttcttactggttctggccatgattgatattaatttctataacttagatgagaaaaaatataaaaacatggttcgagaattagagaatagagacaaagtttatttggatcatattgacgatttcaaagcttaaaacatgatagtcaacagaaaatagctgaggaggcgttctgcatgaagattatcaatccagtacttaaaggattcaaccccgatccgagtatttgcagagtgggagaggattattatatcgctgtatctacatttgagtggtttccgggagtccagatacaccattcaaaagatttagtcaattggcacttagttgcacatccattacagagagtttcgcaattagacatgaaaggaaatcctaattcaggcggggtctgggcgccatgtttaagttacagcgacggaaagttttggctgatctatacggatgttaaggtcgtagatggcgcttggaaagattgccacaattatttagtgacttgtgacacgattgatggtgattggggggagccgatcacattaaacagctcggggtttgatgcttctttgttccatgatacggatggaaaaaaatatttattaaatatgttatgggatcagcgtattgatcggcactcctttggaggcattgtcatgcaggaatattctgataaggagcaaaaactgatcggtaaaccgaaagtgatatttaaaggaactgaaagaaagctgacggaagcgccgcacctttatcatatcgggaactattattatttattaaccgcagaaggaggaacgcggttcgaacacgctgctacaattgcccgttctgcaaatatcgaggggccatatgaagttcatcccgataatccaatcttaacgtcatggcatgatccaggaaacccattgcaaaaatgcgggcatgcatccattgttcacacacatacaggcgagtggtatttagctcatttaacgggacgtcccattcacccggacgatgattcaatttttcagcagcgaggatattgtcctttgggcagagaaacagctattcaaaagctctattggaaagatggctggccttatgtagaaggcggaaaagaagggagcttggaggtggatgcgtcttctatacctgaaaccatatttgaagacacgtatccggaagttgatgaatttgaggatgcgacattaaatattaattttcaaacgttaagaatcccttttacggagaaattaggttcattaactcaagcgccaaatcatttacgattatacggccatgaatccttaacttcgacatttactcaggcatttgtagccagacgctggcaaagtctccattttgaagcggaaacggctgttgcgttttatccggaaaattttcagcaagccgctggtttggtgaactattacaatacagagaactggacggctcttcaagtcacgcatgatgaagaacttggccgtattcttgaattaacgatatgtgataacttctctttttcacaaccgttaaaaaataaaattgtgattcctcgtgaagtcaagtacgtctatttaaaagtgaatattgaaaacgaaaaatattattatttctattcatttaacaaagaagattggtacaaaatcgatattgcattggaatcaaaaaaattatcagatgattacatccgcggcgggggattctttacaggagcttttgtagggatgcaatgccaagatacgagcggaaatcatattccggccgacttcagatatttccgttataaagaaaaatgaatgtccgcatgaaaaaggagctttctattttggaactcctttttcatattagaaaatgcccgtgtggaaaaacacgtcagaaatgctcccattcaggatgaaaataacaaaacaaaaaacccatctttaaagatgagcgtaaaacatagaagtttgtacatttcagttatgaaccatgtcgagaaaatgatcaatcacaatagaggacattcccaatgccggtgcgttttttcctaggatagatggtaataattcatagctattgtctaggtgggaataaaccctggacgatacttcgcttttaattgaatgtaaaactataggatgcgattcgatgatgctgtttcttaaaatgatggcttgcggattaaatgtatttaaaatattggtcaggcctatccctaaatagaatccaaaattctgtaatgcatgtaaagttccaatatcattcagatgggcgaggtctatgatatcttgagtggacacttttttctcttttgtctgaagagatgttaataaagccttttcggaagcatacaattcccagcagcctcggtttccgcagctgcatttcggaccattaaagtctattgtcatatgtcccatttctccagagaatccgcttacccctctgtataaatcattgtttataataacgccgattcctatccctgtaccgatacttgcataaatcatgttatcgtgatttttggcagcaccaaatactttttctccatatgcgccggcatttgcctcattttcaataaaaacgggcacattgaacttcttttggatgaaagattttaagtcaatatctctccagttggagttcggagcgaaaacaattttttgatttttatcaattaacccgggaacgcatatgcctataccaataagcccgtacggagattgcggcatatttgcaataaagtgaagaatcatctcaattaaaatatctttcgttatttcaggagagctgcattccaaatggtggtgttgatcaaggacgatcgtcccttcaagatctgttaaaatgccattaacataatccacgccgacatctattcctacggagtatcctgcttttctattaaaaacaagcatgacaggtcttctgccgccgcttgattgtccctgaccgatttcaaatacaagattttctttcattaatgtgtttacctgtgatgaaacagttgatttatttaatccggtcatttcagataattttgctcttgaaataggagaattcttaagtatttcgtttagtaataacttttggttaacttttttgacaaaggcttgatcagcgatatccacttcatccactccgtttgtataatctttaaattaagttgaacgttctgtgttatcgtgcgaaacgcagtacatagcgaatccaacctttattatatctaatgtgttcgtaaaaaactaaaaaaaatattgaaaatactgatgaggttatataagatgaaaataagttagtttgtttaggcaacaaactaatatataacatgacataaaatcatctgtattcgaatcatcaagtttagaatttatttttaagggggaaatcacacatggctcactctcattccggttcagtcaactattttgaaagcgtaaacaaagtgatttacgaagggaaagaatccacgaatcctttagcatttaaatactataattctcaagaagtaattggcggaaaaacgatgaaagagcatctgcgattttctattgcctattggcatacatttaccgctgacggcacagacatttttggcgcagctacgatgcagagaccgtgggatcactataaaggcatggatctggcgagagcgagggtagatgcagcgtttgagctgtttgaaaaactggatgcgccattttttgcttttcatgaccgggatatcgcaccggaaggaagtacgttaaaagagacaaatcaaaatctggatataatcgtggacatgataaaagactacatgagaaccagcggcgttaagttattatggaatactgcaaacatgtttacgaatccccgtttcgtccatggtgcggcgacttcttgtaatgcagatgtatttgcgtatgccgcagcccaagtaaaaaaaggattagaaacagcaaaagagcttggcgccgagaactatgtattttggggcggacgtgaagggtacgaaactttgttaaataccgatttaaaatttgagcttgataatatggccagatttatgcatatggcagtggattatgcgaaggaaatcgggtatacagggcagtttttgattgaaccaaaaccaaaagagccgaccacccatcaatatgatacggacgcagcaacaaccattgcctttttaaagcaatacggcttagacaatcattttaaattaaatctcgaagccaatcatgccacattagccgggcatacattcgaacatgaattacgcatggcgagagtgcatggccttctcggctctgttgacgcgaatcagggtgatccgcttttaggatgggacacagatgaatttccgacagatttatattctgcgacattagcaatgtacgaaatcctgcaaaatggcggtcttggaagcgggggattaaactttgacgcaaaggtcaggagatcttcttttgagcctgatgatttactatatgcccatgttgcagggatggatacatttgcaagagggttgaaagccgcccacaaattaatcgaagatcgtgtgtttgaagatgtgattcaacaccgttaccgcagctttactgaagggattggtcttgaaattgcagaaggaagagctgattttaagacacttgagcaatatgcgctgaacaatcagccaattaaaaacgaatcagggagacaggaacggctaaaagcgatattaaaccaatacattttacaggtataaccaaatgaaaaaagaagctccagatcccgcataaaagatgcaggcagccaagttcccggaattgcccgtcatgaagttactgttatggcgggtcatttcaacggaaatctatttagagaggaaggagtgaaaaaatgaagtatgtcattggaatagaccttggaacgagtgctgttaaaaccattttagtcaatcaaaacggcaaggtttgtgcagaaacgtccaaaagttacccgctcatccaagagaaggcgggatatagtgagcaaaatcctgaagactgggtgcagcaaacaattgaagcgttggctgaattgatttcgatatccaacgttcaagccggggatattgacgggattagctattcaggacaaatgcatggattagtactgcttgaccaagatcggcgggtgctgcgtcatgcgattctttggaatgataccagaacgacgcctcaatgcagcaggataaccgagacatttggcaatcatctgcttgatatcacaaaaaatcgtgtccttgaagggtttacattacctaaaatgttatgggtgaaggaacatgagcctgaactttttaacaaaaccgctgtttttctgcttccgaaagactatgtgagattccgcatgactggcgccattcacaccgaatactccgatgcggcgggaacgttacttttacatatgacccgcaaagagtggagcgatgagatttgcaatcaatttggtatttcagcagaaatttgtcctccgcttgtggaatcccatgactgtgtaggatcgctgcttccgagcgttgcggcgaagacagggctgctcgaaaaaacaaaagtgtacgctgggggagcagataatgcttgcggtgctgtcggagccggtattctttcttccggaaaaacgttatgcagcattgggacgtcaggagtcatactttcctgtgaagaagacaaagaaagggattttaaagggaaagtgcacttttttaatcatggaaaaaaggattctttttatacgatgggggtcacgctcgctgcagggtacagcttggactggtttaaaagaacgtttgcgccgaacgaatcgtttgaacaattattgcggggggtggaatctgttccgataggagcaaatggactgctgtacactccttacttagtcggtgaaagaacgccgcatgctgattcatctattcggggaagcttgatcggaatggacggagcccataaaagagagcactttttgagggcgataatggaaggcatcacattctctttatatgaatcaattgagctattccgcgaagcgggaaaatcagttgatacggttgtctctattggcgggggagctaaaaatgaaacgtggcttcaaatgcaggctgatattttcaatacgagggtggttaagttagaaaatgaacaaggtccggccatgggggctgcgatgttagctgccttcggaagcgggtggtttgactctcttgaagaatgtgcagagcagttcattcatgaagcagctgcattttatccaaaagaacaaaatgttcaaaaatataaaacactattcgagttgtataagaacatttacgttcacacaaaagatatcaatacagctttaaagagctttagacaaacctaattttcaggaggtcaaaggaagaacaataaacggccactcattatcaatggccttggttttataaatctgttaacaaatgagaaagccggcattaataaaccatggaatgcaattctttctcccgcgcaatacactaagcgattacagtttagggatatcaaagcagcggcagcgctaatataacttcaaatgtgttaacactattgaaggaaacagataagcattcttgtaagttgtgactgcatcagtctaaactcatatgacgatgaaatgagaagtatacacacaaaacatcccctcacattgcgtgggggatgttttttattattgagattttcctgtttcttgaatccgtggggatagcctttctgcaatggattcacaggtatcactcaacttcaggatttccttagaaaatgaagaaagaacctcgccaaattggccaggttctttttatattgcacaaaaacagacacggtgatataatcagaacacgcgcgctttctgtgttaaaagtcatagttatccatcttatattatgattatatcatgctgaaaagctcttgtcaaatttttttgaaggggagatatagaatgagttctttggttctcggcattcacgaaattgaaaaaacacagcctttgctcgttggaggaaaagggttacatttaggggaattatcaaaaattcaaggaatacaagtaccggaaggattttgtgtcacaaccgccggatatcgaaaagccattgaacaaaacgaaacgttacaagcgctgttgggtcaactgaccatgctgaaagcggagaatcgggatcaaattggtgaagtcagcaaaaaaatccggcaaaccattatggaagcagaaattccttcagatgtagtcaaagcagtcgcttgccatctctcccggttcggcgaagaacatgcctatgccgtacgttctagtgcgacagctgaggatttaccgcatgcctcttttgccggtcaacaagacacctatttaaatattaccggcgtcgatgcgatcttgcagcatatcagtaaatgttgggcgtccctatttacggatcgcgcggtcatttaccgtatgcaaaatgggtttgatcacagccaagtttatttatctgttatcatccaaaggatggtgttcccccaggcttcggggattttatttaccgctgatccgatgaccggaaaccgaaagctgctgtccatcgatgccggttttggacttggtgaagcactggtctccggcttagtatctgccgattgttataaagtacaggacgggcaaatcgtcgataagagaatagaaaccaaaaaaaaggctgtctatgaacgaagagaaggcggaacggaaacacgggagatcgatcttgatcagcaaaagattcaaacactgactgatgaacaaattttacagctggcacgtatcgggagacagatcgaagctcatttcggccagccgcaagatatcgaatggtgtttggaccgcgatactttttatattgtccaaagtcgtccgatcacaacgttataccccgttcctgaagcgaacgatcaagaaaatcacgtctatatctctgtcggtcatcagcaaatgatgacggatcccataaaaccccttggattgtctttttttctgttgacgactgctgcacccatgcgtaaagccggcggaaggctatttgtcgatgtcacacatcaactggcatcccctaatgtcagagaagttttcttaaaaggtatggggcagcacgatccgctcttaaaagacgcacttatgaccataatagagcgagatgatttcattaaaccgatacatgataaaacggcgccgattcccggcaaaggcaatgcagatatgccggatcaagctgaaaacgatcctgcaattgtttctgatttgattaagagcagtcaggcatcgatagaagagttaaaacaaaacatccagacgaaatcaggatctgatttatttcgttttattttggaagatatccaggaattaaagaatattttatttaatccaaaaagttcggtgctgattcgaactgcaatggatgcttcatcatggattaacgaaaaaatgaacgagtggttaggtgaaaaaaacgcagcagatacgctttctcaatctgtacctcataatattacttcagaaatggggcttgcgctattggacgtcgccgatgtgatccgtccttatccagaagtaattgcctatttagagaatgtaaaagatgatcactttttggatgggctggtgaagtttgaaggcgggcgggaaacccatgacgctatctatgcttatctcaacaagtacggaatgcgatgtgccggagaaattgatatcacaagaactcgatggagcgaaaaaccaattgcacttgtccctatgattcttaataatctcaaaaactttgagccaaatgccagccagcggaaatttgagcaagggcggcaggaggcgttgaagaaagaacaagagttattagaccgattgaagcaattaccggacggtgaacaaaaagccagagaaactaaacgaatgatccaaatcatccggaacttcagcggattcagagaatatccaaaatacggcatgatcagccgctacttcgtttataagcaggctttactgaaagaagccgaacaactcgcaaaagcgggggttattcatgaaaaagaagacatatactatctcacttttgaagaacttcaggaagtcgtacgcacaaataaattggattaccaaatcatcagcacacgaaaaggcgagtacaaagtatatgaaaaactatctccgccgcgtgttatcacgtctgacggtgaaatcgttacaggcgagtacaaacgagaaaatctcccggccggagcgattgccgggctgcccgtttcctcgggagtcatagagggcagggcacgggttattttaaacatggaagatgccgatttggaagatggggatatattagttacccctatactgatcccagctggacaccattgtttgtgtccataaaaggcctggtcactgaagttggcggactgatgacccatggagcggttatcgcgcgtgaatacggcttacctgcagttgttggagttgaaaatgcaacccaattgataaaagatgggcagcgaatccgcgttcatggaacagaaggctctattgaaatattataatagcgggtgtgtgcacgtcaccagatatttcctgcatattaactgacaaataccgaacaaaaagaaaagccggaaccttttagaagaggaatccggtttttttatgtgaaaatgatttaatgtgtgaacaccgcattttgtgggcggacccttacaaaaaagattcagtgactaaatctaacgatgacaattttataaaggtgagtaatatcctttttaagttcacaacctctgtaatcctgatgaattaaaaacgccttagttttttaacaactatttaggggttttgttcatgaacaagtctttattccgaattgaattgttcaccttattcttcatagcggcaatattggcgcaggcaggggagaaaactctcccgcttaccagagtgaaaataaaaaatgtttatcttagatagatttttttaaaaagtaaaaacgccataaaacttcttatggcgtctgtccgaactaagggatgcaatgtttgggagacgaatataaatcgtcaatgtgctagaaaaggaatgcagcacctacaatgattaacaaaatgaacagcacaacgatcaatacgaaagaacttccaccgtaatttccaccgtagttccccatattattgccacctcctgttgttaggatagtacataatatgccggacgataaatttcgacatagatttaagtctaaataagaaaaaatggatattaagtctaaaatgaagagcttctaagaatatgaaataatggaaagagagaaatggatgggacggtttgctgtttaaagaggagggatatggctcaacatgcaataaaactgtggatgaaagtggtgagccatgacgttacttcatcatgcagagccacatacgaagaggtacagggaaattatagttaacgaaaatattcatcatttcccgggcaagcgcagtatacgacaaatcaaaacaaatcacaaagggacggaaggtacgatacaaggaggctgcttgcgggtttgtggtgcagataaagtttccgtttcaaaaaggtcatatgtttattcgacactttacgtttattcctgcagaatgcttggaaaagaaagtcggcaaaactgccgactttcctaacggaatttagatctcaacagatctaaagaaaccatcgacactatcaccggtgccgctatcatatttcaggatgtattctcctttttggttaacgctgaattcttgaatgaacgttttccccgcatttagtgtcgtagaggataagagtgtattcccattaggataattaatggtgaatttgaaagatttgctgccgtcattcgctacaaaaactctgatttttcctggagagctgccttgatagttgaatgaaatcttaccggtaccgccagaaaaaggctgacacgcaatatacggagcgtcacatgaccaaccggcaggtttcatgactttatcttgatttggcaaagattttgcagaaacatctgcagcccccattagcggaattaacccaaaagcaagagcgccggcaataattttctttttcattcgtattcctcctcttaatagtgaatgtgatacagctataaatttacaatatttataaaataattccttctttttcaagttgagagaagaagaaaaatttaaagaggacaaataagtgtcacaaattaacaatccatgcactgcagtaaactggtcaaagcatgaagatgattttacgctaatgttttacaaggcgatcttctcactgtgagttaaagaacaagacgattgttaaccctgtgcgggtacgtaacaactgaaagaaagtaaattcccggacaaggagtatttctttaacctgaaacttttataaagcattaacgtattactttataaaggtaaataaggaggcttctgaatgggattaaaaaatttctttaatactgagttaaaatgctctatctgcggaaaaacattaaaatcaggggatgagataacagcttatcttacacttccgagtgagaagaagatgcctgtgggtagaatggacaaagtgttaagcaaacactctgataaggtctgctgtaaaaagtgcagtgagtaggtttttagtgttatgaggaacctctggtgggtttcctcataacagctacgcttcggcaatgaatgacctggaattatattggtatcagggttagtccaggcagtacttgcaaaatgtatgtccgccgaatggtctgtaaagtttcttttctgaactaaatgacaaagtcttattcagtctgggtggggcgctgagcaagaatagagattaaaggctgccgtatcattcccggcagccttaatgattaggaagtaaaatcgataaccatgcggccggtcactttaccttgctccatttcttcaaaaatatcattcacatcttcgatcgggcgttttgtcactttaggtacaactttaccgtccgcagcaaattgaaaagcttccttcaggtcttctctggtacctactaatgaacctactacctgaattccatctaacacaagacgtggaatatctaaatccattttgtccaccggtaaaccgactgcgactacacgggctcctgcttttacaacatcaatcgcttgattgaaaggggttttagagacagccgtgatgaccacagcatcaagccctaaatcgttagtcacttcttttgccttagcgacggggtcttcgtttaaactgtttacaaccgcatcagcgcctaagctcttagcaaaattcaatttttcatcgctaatgtcgaaagcaatcactttagcgttaaagacgttttttgcatattgaacagccaagttgcctaaaccgccgactccaaatacaccgatccattgacctggtttaatttcactgactttaaccgctttataagttgttacacctgcacaagtaatgctgcttgctgctgcaggatccaaattttccggcacctttattgcgtaatcgaccgctacgattgcttcttcagccattgcgccgtcaactgtatagccggcattttttacatcacggcacaaggtttcacggcctgttaagcaatattcgcagcggccgcagctttcaaacatccaggcaatagagacgcggtcgccctttttcaggcttgttacgccttcaccaatctcagtcacaatgcctattccctcatgacctaaagtgacgccggtaacatccccgaaatcagcatttttaacatgcaagtcagtatgacatacaccgcagtattccatcttaactttggcttcaccatgccgcaaaggacgtaattctttttgtacgatcgctatacttttgtcttttgttgctactactgctttcaaatcatacacccctttcaaatattcgcagaaaatttttacttatcttacaatttagcacacgactcttcttttgaaaacccttacatttttgcggacaagtgtctctacaaaaattgagggagctatgcagggaggattctacggatgatttgtcatccgaagggtgtttaaatgggggtttgtcatctccaaatgcacagaatgctttgaatttgcggtcataatctttctatagatatttgacttgcactgcagagaattacgccgtcaggatatgattttacccttagtgaaaagaatttcacgggtgatcatttgaacttgagcgcggctgataaggtgaatggtgatgcaaacagaaatcattacttattggtcacaaaaggagccggctgcggagatgtgtggatttcacggatttgaacacgatgagccggatgcagattggtgagcgatacacagtcaaggtatttccttgaccttttttatgggtatactgataattaaaagtaatcatagtatactaaagttacaataaaagtaacgaaatacaaattttaaggagttgcataaaatcattcttttaaagagaaggggatcaggttggatcagttaataaatcctacgaaacattctttttattttaggctaagtaaacatgactgttataaagttagaacaggaaagtgctccttagatttaactgataaggaatttaatgctttagaaggcgaagagcatgaatatgcattaaaatgcagaagattggctgcgcactacataaaaccggacatgcataaaaaacattcaggaatatatgcaagcgtaaatgcttgcggtcatatttcgtttagtgatggtcagcacaggatgtgtatctgcaaaaggtcaggtgtcgataaattacttattcatttatcaaacaacggagattatatatgtcatatatgccaggacaaaaacaaaaaattaacagttaaagaaaaattgaagcaaaggttttttaaaaaggattcgaataaacttgcaagagaaaatgattttattgatgatgagttttttgattaaaccaatcttttatttcaaatggaggggtacatttgggtatactcaactttttcaagaacaaagttaaaaatgaacaaaatgagaataaaaataataatatgaacactgttggcgttaataacgaaacagagatggtatcgaaaaaagaaaatttcccaatcttgattcaagagacaggcttctcaaggaaatatgaagaaaagtctgcatttttcgagtatatagactttaaggttgcaggaacatcacactatcaaaaagatattaagaaagccatcaagactgaggatgaagacagctttttcttcgatgaaaaatatgatggtatgacaaataaagagattctagaatcaacttttgatgagccgatatttatttatcataatttccttttctcaaattgtgaattgcggttagaagagaacaacaagtacgatccggaagctatagctgtctatgtaaatgattgcaaagtaggacatgttcctcgaaagaattttcaagaaggcaagaaatacatttacgatcagttaaagagtggtataaggcacccgatatcagcaagtttgtatggagggaaatataaagttaaccgcgatgatacaaagattgaaacaggagaaacagattataaaattgaatgtcaaatagtgattaaaacagacaaatagacaataaaactacgatattgtaagtgcgaagtaaatgaacggggcggtgacttgaagctgaattcaacaagattaaagagctatacctacacattggctttttcaagtttgtcgtatggtttgattttcgggctatatatgtttgtatactcgggttttgtgccaattgcattggttactgtagttatcattgctttttacgcattcattacttactttttgtttgctgttcctgtgcaactatggctaagaaagaagcctaaaaagtttagtttggttcatcttttcatttataccgcagtcgcttttttagctgtgttcttgttctggcacataggtaatccgtcaattgatttcacggttttcagaagtttcatttattacataatgagcattgctgctgcgttcatatattggtactgggactctatatttctgagaaattacaatgttcatcggaagtaaagctgatgtttccaaaagaaagcgggtgaggaaaaatggaatacattgagttgaccagggacaatattgatgacaatcatatttgctgtgcgttaggtacgaaacaatatgaggatgcggtaaatgaaaagaagagctggctcaaagatcggatgagtgatggcttggtgttctaccgcctaaacgaacgggccaaagtttttattgaatatttacctgcagaagaagcgtgggtcccggtaagcgcacctaattttatgtttattaattgcctttgggtctcaggtaaatataagaataacggacatgcaaaacacttgttagaaaaatgtgtgtcagatgcaaaatcccgcggtatggatgggatagttcatatagtggggaagaaaaaactcccttatttaagtgataagcatttcttcgagcatatgggatttgctgtgcaagatgaagcagaaccctattttcagttgatgtcactgacgtggaatgaacatgcacatcctcctgtatttaaaaaacaggtgaaaagtaattccgttaatgatgagggaatcacaatattttatacagctcaatgcccatttgcagtcggagtgttaaagcatttaaaggaactgactgaaaagaaaggacttcattttcaggccctgagaataacgtcaaaagatatggcgcaaaaatccccggcagtttggacgactttcagcatgttttataaggggacatttctcactcatgagatgatgagcgtaaataagtttgaaaaaatactcaataagcttttaatggcttaactttgttttattactattgctcgtttttatattcgatactgagggtttttcacgaaaattgttcagtactttacattgcgggcggcaaatgaatgattattgtttttgacaaagatgataacacccatcattatagtaaaaatagattgtgataagttcttcaacaaacgaagaagttcttttcaaaggtcgataacaatgaaacaggagactgcaaatgcaaaaaattgaaacccatcgcttaattttaagaaattttaccgagagagatgcacaaggtctgttggaatattcggcacatccgagagtgaattgttttcttgatgacagaatatctacgttagaagaagctgccgtaaatgttcaaaaaagaagccgagatgactcttatattgcagtttgtttaaaagacagtaatgatctagtcggagaactattttatttaaaagaagagccagatacctattccgtttgttggaatttcaatgcccgttttgaaggggcgggatacgcaagtgaaagtgcgaaggctttctttgagtatctctttatgcaaaaagaagcaagaaggctttatgcatatgttgaagatgataactgcaggtcacaaaaactatgtgagagattaggaatgcgtaaagaaggttattttcttgaatttatttcatttactgcccacgaggatggaacacctaaatatgaaaacacttaccaatacgcattgctaaagaaagaatggttaaaacaaaaacataggtaatagaatttgtggggaaataatctcccctttaccgaaaaaaccctgctgaaagcaggtttttttgtatttaggttacctagtaacgatcaaaaagattcagcttgaaggttgggaaaaacatgaaaatcattatagcaatgttgtaaaattagagagaggatgattgtgacggacattttgcagtttagcgacagaaggtgcaggaagtaatttgaatcagcaatgttcaattcattttgatgaatttaaagaagcgcttgataatcaaaatgtgaaaagcagttcagagtcaagacccattttgcggtgagaccggaaatatgctcttcatcttctgatgttgttcaaagctgacacctcttgatgcttatgtataagaaaataataccattgaaatatatgtataaggttggaaacggaggggatcaaagttggtgcgatcttgtgtaaaagaaaggaccaggatgaatgtgaccagcatccaccctgatcaatggggttcacagtgttctatttcattgtattccaatcggaataatattacaagggtgaaaaagaaataagcggaatgttttcggcttcttctgtctctggagcgggaaacggaaagtgagatgtttgaatgaaaataaatgattatctgaaggaaaggtttccgactttaaaattagtgcccggcatttatcatcaatgggacgtgggacttcatttttctctcggcggcaatatgtatcaatttaatgaaagcggtgctttgaatcttgagtattttcagcttgttcatcatcaaaccgccgcacttttcaatgaactgtttgaacatagcgatgacatgttccttgttgccaacgtatataagcacaaaactcaaggtaatcatccgagaaaattaaaggtttatcagccgtttctgaagtgtaaggatgatttatatcggatccaggtgaagacctgcccctgtccgtttgaagaagatgatgcagaagaatatgaaatgcagcagttttctttattatgtaaacggaaagatctgcgtattccccaattacttaaggcagccgtccacgaagattttccgctgaagccaaggttcgggggctgttccgttgggtatcccgatgttttctttgtgaatatgacaaaagatattattttctttctatatgatgacagagggtgtgaagtcatcgctcttgatgccggaagaataggaaagctttatgatcaatatcacgattggattgaattggactgaaaacgaacacatgaattcgaatccgcttgtgccggctttgttcttgcctagtccggctgcatgagtataatgggcagaattgaagggcgccggaaactttttttcctctcataccggccttctgcatgttaagcttctgtatttattttgaataaattcctatttataaaacggctgaatagaataacataaaagcttttttacacagtgcaggaggagagaaatgtgagggctgaacaccgtgattgtatggaaattggaatttattcatttgcagaattatatcccgatcctctgacagggaaaacagtcagcgcaaagcagcggatagatgaattgatgaagctggcgaaactggctgacgacgcagggcttgatgtattcggggtaggcgagcatcatcgtcttgattatgcggtatcttcgccgccggccatcttatcagcgatttcacagattactgaaaatattaagctgaccagtgccacgactgtattatccaccgcagatcccgtccgtttatttgaggattttgcaacgcttgatctgatttcagacggccgggcggaaatcattgcgggacggggcgcatttttagactcgtttcctcttttcggttatgacgtaggccattataaagaactgtttgaagaacacattgacctttttttaaaattaaattccggggaagaatcggttacctggaaaggacgttaccggccgccgctgcgcgaggcagaaatttctcctcggcctttttgcggaagcattccgctatggttaggtgtttcggggactccggaaagcgcagaacgagccgggcgtgcaggtgcgggtttggcattggctgtactgagcggtgatccgatgtcatctaagccgcttgttgacaaataccgggaagcggcttctaaagccggtcatcctccggaaaatgtgaaggttgccgtgaccggacatatgttcatttcaaaaacgaatgaacaggcaatacaagaattttacccgtatcattcaaattactggtctcacgttcattcatatcacgggatcgatgagcctttaacgaagaaagattttgagcgggcgtccggaaaagaaacagctttatttgtgggaagttcacagcagatcattgaaaaaatcatgcatcaatatgagttgttcgggcatcagcgatttctcgcgcaaatcgatataggaggtatgccgtttaaaaaagccgcggaaaacatcgaacgattagcagcggaagtagcaccggttatccgaaaagaaacccgcaaatccagcgaatgaagttctgagcataaggggcgggccggtttttggcaatcgcggattcgacaacagaatcggcccggctttttctttatgattataaaaaacaaaggggaaagcgcgaacctcattgctttttcctatcaagaaaaggaaggtcatttcatcctctatcgtgaagtgtatataccgaaagggattttattaacaaaaaagggaggatgatgcagtaatgaagggtttggtcaaagctgcagttttaactgttactcttgggattggaggcgctttctattcaagtgatgcatctgcgcacgggtatataaaagagcccgtcagcagagcgtacatgggagctttagagaaacaaacattgggctggacggccgctgcgcagaaatatggctccgtcattgataatcctcagtctgtagaagggccgaaaggatttccggctgcaggtccgccggatggaagaattgcgtctgcaaatgggggatcgggacaaattgacttcggtttagacaagcagactgcagattattgggtaaaacaaaacatccgcggcggttttaacacctttacttggtactacacagctcctcatgcgacatcaaagtggcactattatatcaccaagaaaaactggaatccgaataaacctttgtcaagagatgaatttgaattaatcggaacggtaaaccacgacggttccaaggcagatacgaatctgactcataagatttttgtgccgactgatcgaagcgggtatcatgtcattttgggggtatgggacgttgcggatacttccaatgccttctataacgtcatcgatgtaaaccttacacaataatctatgaattactgatcggctgcatgttcatcggccgatctttttagttttaatgtgtgaatgaaaagggtaaaaacagcagagcgccataaacatttcatttatggcgccgtacgatcatggaggtgctgctgacatggatgcggaggtaagaggattcttaataaccgccgaggaaagaagccccaacgatgattaataaaatgaatagcaccacgattaacgcaaaggagctaccataaccacctgagaatcccatataatctcacctcctaaagaggattaatacatactatgccgaaatgaaaagtttgatagggatgctagtttactttttgaaaaaaggtttcttagtctatatttcctttacatggccatccgttaaaatgagtaaaaggaggaatcgtactgcttcctgtaatagaaacggataggctcatacattgagaagttgcgaagagggtgcgcagttggcttgtttttttaaaaatgaaaatgtaacacgctattaggattggaaccttttgattcaacggaacaggctgaagaaatgattggttggtttcaagagcagcagcatgaaaaaagtggatgtgatgaggaatagagaaaaaagatgcgaaaggcataatcggaaccatgtatcaaaacggactgcctggtgatatacgcgtatactccattccgaatgggaacgtaacgatctaacagaagaacttcaagtgttctgcggtaaataaaaaaagccgatgaaggcttaaaattgattagacgctgtaaagcattctttttgctgcgctttctgcagacggagtttgattgtaagaaacgattccgatcatcactaacaagataatgaaaaccaatatgctccacaacactatttttaaagactttgacatggcataccctcactttgaaagactttaccggggctgcgatcggagcccgcacttcaagtatagtcgttataacggtgaaaaatgtacagtatcccgttatcaaaataaaaacttgcgggcgctgccgcaagttttctctgaattaaggtctgtggaattcaatatgctgattatcacgatcgaaccatcctctgaatgcccaattgatccagcccccgtctcctttgttattaaaggaaccgtcttcgaagacccagattccgtaagtaatgccgtcataaacggctgatccgtaaaattgaacgccgttaaagcggtcttcatattcttgatttaaattgaacaccatgacgttgtacttctgtcctgatgcgtaaaatgttgtttccatgacattttttacccagccggttcggttttgatctgacttaactgcttcagctatgcgatctgcgattccgagaacatctacgtttacgttcagcccggcatcaacacctgctgcttttacgttttggcctgctgtttgggataatttactttctaacggatttgcaacgggtgaaacgtgaggcgcattcgggtgttcagactgactggctgctgaggcactggctgtgaaaggaattgttagagataaagctaagcatgatccgactattgttctggcgattttcatgtctatgacctcctgaggaaattttttaaaattgttgcaaattcatggtatcgcagaaaaattgaccaagcaaagagcagattttctcaaaagtcatgtcattctatttatgttgttttctgtaaatgaaatacttttaatcaggcgaaaagggaagaaaataatagagtctttttatgtattgtgataggatgaccggattttgggtgaaaatagcccggagaaacgtcataataagaaaaacacccgggatttaccgggtgtaaaaagtattgatatgtcaagtcagcagcattttttgcattttcttttataaacaacgatgtaatcataatcaagatgctttttatcttgtttcttctttttcttcttttgtttaggctgctttggctggtgatcataatgtccgttcatatccatacccatgtccatacccatgtccatactcatactcatattcctccttttttcatctgacggtagtattctatgacagaaagcatggatggcttggacaaatgaaacggtatgctgaaaaagaggcatctcattcggtataaaaaacaggattatacccgcccgatagaaaagagagaagatgatcctgatattgagatcctatttgataaccgcaattgcaatgccgtaccctttttcagcgctgtataaggccgtcagtttcaataccttccagccttccgcggctttagtcccgattccgttatgagccgtgatataatctcccgggctgaccgtactgtcgactcgtacgtaatgccggccgttgagtccgacaatatgccattcgtctctggccgcgcgtgcttcatagtcagcttcaagagccggactgcagtccgggttttgtttcggtacgcgtactgtttctcctgtttcttcgtcagtcacattttcgtatatgaaaccgccgaactcatttgtcaaaaagcggctttgccatccgaagcttgcggctcctgagataaaagcggctgtttctgaaatgacgccgagcatataatcaccgacgtgagccggttcaattttttcgcctttcactgtgacgatcgtcccggcgggaatcttctggccggttacactttcaaaatattctccgtaccctgacagggaagaggtgacagctccggcgaacgtaccgtggccgcccgctgaatccagtttccatttgatggactgatgccctccggcaaccgtgtatggttcttccaatgtaatgctttctgatgacagaatcgttctggagactttgccgcccgtaatatggacattgtttgaagcggcgataaatgcccttgaaccttcggaacttgaacctccggaagagctgatgatcgcatttctgtcacctctggccgtaatatcgcctgttcccgcaataacggcgcttgtcgggttgaatgcaaaaccggagctggtcgcgagctgtgcgcctccctttaaattgacggggatctgctcataagtctgtccttttatagatgcggcagcgctgtaaccttccgcttgcaccccgagaatgacagcctgactgttaggggacgtaattccgacggaaccgccgtctccgatcatcgtaccgttcataatatttacgttatattggcctccgccgattgtgatgcctttaggagaagacttgtatatatcaaaatttaaaattttaacataatcggttttattagatccgccggatatattgatgtcaaccccggcttgtgtaaagccgcgtattttaatgccgttgatcgtaatattttgactgcggtattgaagagccacgactggattcccgccatagtcgtatgagggatcaccaatagctgtgaatccgtttacattaacgtttttataggcagagatgaccagcgccctcggggttacaccgtcatagagggcattgaataccggttcaatcgcggtgcaatcggttaaagtaacatcataagccgtcgtgctttcggggtctgaggcctgatgatggccgatatgacgaatatcaaatgaacgtacatcacgatacgaaacatgaccgataatatgaacattttgagaagccggccacaggctgtgcgcctttacctcaatcccgcggatatttccgctcgtatagttatttaaaagccacacatgtttagagccgtcgtcaatttcaatgccgttcgagtttgcgctgccctcagcatgctctgtgccgcgggggtttccggaatggcagttggaaatgaaaatatattcgctgtaatgggtggtaatgccgtcgtctccggcgccgtatgccacacagttatcaatccatatataacggcagccgtctttcgtccattctgtttcaggcaaatgatcgtaagtcggagatgtaatatctataccatgcagacccgcgttaaccgtttcaacattcttaatccagccgtattgcacattagcaaacgttaaacagctggaacactgtcctccggggttcctgactccgcattgacggtcaggattccagtctaaagtcatgttctggacaaaaatattacggtttccattttcgtaatcatcgttagtaatgacccattcgtatgcgggagtgtcctcatgaagcttaagcacggtaatcccttgtccctcaccggaaatagtagtccatgaggggagttttatcccttgaaccaaaaattctcctgcgggaacatttactttgacccggccgttcccgatcgcattccgaaaggcttctgtattgtcccggccgtcagggaccgctccgtaatcctccacattcacttcccgggtgattttattcataagcatttcgtattctgtatcaagccgttcttttaaaagtgaggtgaccattccttccgccgtcacccgggcatctgcgatctcaagattatcatccgttgcggaatgcttaataaaattctgcatccttgctttgagatgctccaattcagagggctgtgcagggcgagactgcaatggggcgtttaaagacggatcaggaaagtttttaaattgaaccattctaaagacacctctttcttttgatataagcgcctgaggcaggggacagaaaagaatcgcgcgccctttaagcgcttattcttcaaattctttattcagaacgaaattccttttgaaaccgaggcgaaattttaaaaaagctctgttgaaaggaacggacatatagctttgcattattgtaattgaagctgtcatgtgaaaatggagggaaaaactgataggaggggtcctcattttaggtttattctcattgtcttcgccgtgcttcctcttcggctgcatatacaccaaaatcagcattcttatcagttaaatggtataatggggcacggattggtcatcaatacgactgaaatagggaagcaaaaggagcagcgaacatgactttacaaatcaaaattaaatattcagatgatacgcaaacgagaatcagtaaaattgaacagggcgattggattgatctgcgggcagctgaacatataacaatcaaaaaaggcgaattcaaacttatcccgcttggagttgcgatggaactgccggaaggatacgaggcccatgtcgttccgcgttcaagtacatataagcatttcgggatcattcagacaaattcaatgggagtcattgatgaatcttataaaggcgacaatgacttctggttttttcctgcattcgcgcttcgggataccgacatttccaagggggagcggatatgccaattcagaatcatgaagaaaatgcctgaagtggagctgatcgaagtagacaagctcgggaacaatgaccgcggcggactgggatcaacaggcacgaaataaaacgaaaaaaagactgcttaacagcagtcttttttttatggagacagcagttacattcaaattttttcggggattcttgaattgggaaatcaaacaaaactaaggagacgggtttcatttttatcatttaagctttccgtctctttgaacagaaagacttttttaggctaaaggatagaggttgttttgatgtttttattcttcaagatgaacggaggttttgtccaacgtatataatattgtgacaaaagtgtaaacaaaagaaaggatgatgttatggcaaaaagggttagaagagtagaccgtaaagcagccggcaaagaggcagagcagaagaaaccgtccaaagtcaccctgttctgccgttcgcttcaaaggctgaagcatttgtattgtaacataaacatacaaatgccatcaataaccaaaaaaggaatttcaattttaattttaccgtttttgcttctgccgttctttcgggctgatgccgcttcagatctttacggcagtttcgaggaattaaagctgaatgaagatccttccgatttttccatttcaacgcgggagcatgacccttctgtcctcatattagctatacacggcggaggcatagagccggggaccagtgagttagccagagaaattgccgaaaaccggagtttatatttatttgaagggttaaaatcagccggtaatgcagctctgcatttgacaagttcgcatttcgatgaaaccaaggccgtgcaaatggtgaaagggcactctaatgtcatttcattgcacggttacggcagtgatgataaaaagataaaaatcggcggtacagacagagaacgggccgaactcttgaccgatgtgctgaaacggcacgggtatcctgccgttcttcttggcacaaatgataaatacgcaggcgtcagtccgaacaaccttgccaatcaatcttcatccggattgagtattcaaatcgaaatgagcaccggcttcagaaaatcactatttgacacctttacgctgaaaagcagagcatccgcacaaaacgggaccttttaccaatttacaaaaacgatttctgattttatcagtgacaattattaataagcacgcttattttgtcggcggggctttttcttttgaaatttatgaaactttaagttcttaagatcgtatacataattgacaggatgaaagaaaagaggtgggcaaatgaaagtgatgatcgggtctatcattcttcttgtcatcatcggattcggtttatggctgatgcttagtccaatctttaaacaagtgggaagcggagccaaaaaattaaaaaagtcatgggaggaagaagatcagcatgagcgaaaataagcgcggaaacacaaaaaaaattctcggcggtgtgattataggtgcagcccttttaattgcgggcgtcacagcgtcactattcattgaaaaaataccgaacggttatgtcggggttgtatactcaccgaatggcggggtaaaatccgacacattggaccaaggctggcacttagtcggattatttaataaagtaacggaatatccggtgcgtatgcagacagtgaataatgaaaatataaaagtggcaacctctgatggtaaaaatatagaaatggatatcgcttacaactatgtcgtgcagcctgataaagtagtcgatctgtttaacaaattcggggcggtagacgtcgaaacgattgaaaatacatatttaaaaacaaggctgtgggatgcggcgcgaaaatcaatcagcaaatactcggttattgacacatacgggcaaaaatctgctgaagccgcggccgatgttcaaaagagatttgctgatgatatgaagagtctcggatttttaattgatgatctgacgcttggcgtaccgaagccggataaagccacacaggaagccatcgatgcaagggtgaagtcttcacaggaacttgaacggacacaaactgaaattaaaatagccgaagccgaagcgaaaaagaaaaaaattgaagcggaagggatcgctgactataacgaaatcattaagaaatcaatgtccgatgaaatgatcaaatataaatggattgaaaaatgggacggaaaaacgccgaaagcgacaggcacagactcactgctgcagctgccgcttgacgatcagaagcaaaagtaaaaagaggaggaggcgattgcctcctttttatgttttttcctgagggtctttttccggcactaattcttcagacgcctcggtttgatagctccatagcgtgctatccgtctctgttgtgtccttataatcttcgggaagtacatattgctgcaaataccggtgaaaaaatgcctcaaaaacagaaatgcaaagtgcagagataaccgctgccgcggcaggagagacattaaacccgccaatgttcatcaggaatatccataatataatgaatgaaattccgaaatcagctgcaacggctgtgaaattgcttgttctcggcagaatcatgcaatcacccgcaaaataagtgattaaacttaagatcactgtaataaacagaacgtttaaaaaggttacttggtacataagatccagaacaatgtacagtaaagcaagtgtgagcgccgttttagaagcgaaagcaattacgtgtttcatttgaaccaccttcgttatttcgtttagtcttcattgtaagcaatccgcaaatttttaaacaggtatatagtggttataaagtaaaatgtgaatagacatcacaggattcacaagttaaaatatgtaaaaagggggatgcaaatgaaaaaatactggatatgtattgctgtttttttattatgttttagcggaatacactcagctaaagcggctaccactgaattcggatcaaaaacaagcttcactttggagggaaacgcaaaagagtttcatattgaaaatccgggtgctgtagctgccgacgattactttttaggctataagttcaccataatgaacaactcttcgtgcggtttaagcatgaaactccagcggatggcgctgaacggaaatttttatacattaagttctaaaaactacagcggcagctggttaaacctcagtgcccaagataaaaaatcaattgatccgtatcacaaatacaggattctggttgaaagttcttcaaacgtctgtggtcccgtctatattaaagggttctacggtgtagaatattatcattttgattgaaaatagatactcgctaaaggcagcgggtttttttatatttatatttaacttattgcactatgtactaaatattcatatataaattttttgacgtgcccgcccaaagaaaagataaaaaagcaaattcatcacgcacaaatatataaaaagttgaaaaatgaatgaaaagtttctcgagggaaacattattagttgacttcaaaagtgcgatgtcggataataagaatgtaagtttttcctccttagcaggttcgtttcttaagccagggcgaatctgctttttttatgcaaaaaaaccccttacagaggggttttttacgataaatgaagtttaatagaattaatggacggctctgaatacgccgatcactttccccaaaatgcttacgttttgcaggataatcggctccatcgtcggattttccggctgcagccgcacataattgtcttctttatagaagcgcttgaccgtcgcttcatcatcttcggtcatagctacgacgatttctccgttattggccgtgttctgctgtttgacaatgacgtaatctttgtcaaaaatgccggcgtcaatcatactttctcccatgatttctaacataaagacatgttcgcccggaggaaccatccggtcaggaagcggaaaatactcgtcgatattttcaacagccgtaatcggaatacccgccgtcactttcccgatgaccggaacgtttacgacctggcttttcggaatatggacttcttcttcatccaatacctcaatcgccctcggtttcgtagggtcccgtctgatcaggccttttgtctccagccgcgccaaatggccgtgcacggttgaactggaagccagtcctactgcttctcctatctctcttacagaaggcggatatcctttcgtttttacctcttctttaataaaacgcaggatatcaagctgcctttttgatagcttcgtcatatttcgcacctcaaaacgtcgattttaagtagattatagcatgattttcctgacagtacaaacataggttcgaaaaaaacgattgacagaaacatttgttcgtatatactgaaagatataaaaagcgaacaaacattcttatcggaggttgtttacatggcgaaagaatctatcatatttgtcgggctgtttactgcgattttaagtgccgctattttacttgtttcatgtgcgggaaatgatcagtccctcagccaatatgttaaaataaaggttcaggacggcgatacactctggtcacttgcagatcatgtagcagaaaagaaacacattaataaagaagatttcattgagtgggtgacggagaataatcatctccagactgctgatataaagcccggagacgaacttattctaccggttaagaagaagcatccggccgtatatcagctggccattgtcaattagagaggaaagagagaaatgaaggcgctcatttatgcccgcgtaagcacaaacaaagaacagcagcaaacgtcattaaaaagacaggaagaggagctcagtgagatcgctgctgcaaacggcatggaagtcgtgaaagtcatttctgagaaagccagcggttacgaaatggaccgcgacggagtatttgaaatgcttgatgaaattaaaaaatcacatattgacgcgatattggtgcaggacgaaacgagattgggaagaggaaacgccaagattgcgcttttgcattgtatttacagggagaacgttaaaatatatacgacggctcataaaggtgaactggagctttccgaagctgattcgatggtacttgaaatcgtcagtattgttgaggaatatcagaggaaaattcacaatatgaaaatccggcggggaatgaaaagagccgtgaaaaacggctacaagcctgaacggaatctgaaaaacagacatgaaaacagcggaaaagaaaaaaaagaggttccggtttcggaaattatcaggctgagagccaacaagcttacctttgcagaaatcgcagcgaccttaagaggattcggctatgacgtgtccaaagccacggttcaccggcggtttcaggaatataccgcagacacagaaggcagctgacgcgcatcagttgtaaaaaagactgcgttttagtagtatataatcaacacgcaccaaaggagcttattatgatttctaaagaaaaaatcgcaagaattaacgaattggctcaaaaagctaaatcaaacacaataacggatgaggaaaaagctgaacagcaaaagcttcgccaggagtatttgaaaggattccgctcctcaatgaaaaatacgttaaagagcgtaaaagtgattgatccggaaggcaacgatgtcacccctgaaaaattaaaaagagaacaacagaaaaataatcttcactaaacagaaagaatacggcaatacgtattcttttttcgtatatactaatatcaggatgtgctttacgacaattttcaacaagtttatctcaaatttaagctgaaagagttgagaaaaagtcagcatcgctttatgatgaaaaggtacaacaataaggaaggggattataatggatacaattgaaaagaaatcagttgccaccattcgtacactatctatagacgcaattgaaaaagcgaattccggacatccgggcatgccgatgggagccgctccgatggcatacacgctgtggacgaaatttatgaatgtaaatccgcagaatccgggctggtttaaccgcgaccgctttgttttatcagcaggccacggttcaatgcttttatacagcatgctgcatttaagcggatatgacctcagcattgaagacttgaaacagttccgtcaatggggaagcaaaacaccgggacatccggagttcgggcatacagccggagtagacgcaacgaccgggccgcttggacaggggattgcaatggcagtgggaatggcaattgcagaacgccatctggctgagacatataaccgtgattcattcaacgtagttgatcattatacatacagtatttgcggagacggcgatttaatggaaggcatttcttccgaagccgcttctcttgcaggccatcttgaattaggccgcctgatcgtattatacgattctaatgacatttccttagacggcgatttagaccgatctttctctgaaaatgtaaagcagcgttttgaagcaatgaactgggaagttctttatgttgaggacggaaacaacatcgctgaattgacggctgcaattgaaaaagcgcgccagaatgataaaaaaccgactttgattgaagtgaaaaccacgatcggtttcggttctccaaaccgtgcgggcacatccggcgttcacggcgctccgttaggactagaagagagcaagctgacaaaagaagcgtatgcttggacgtttgaagaagatttttatgttccggaagaagtatacgggcatttcaatcaagctgtaaaagaagccggctcgaaaaaagaacaggaatggaatgaactgttcgcggcttataaagaaaaatatcctgagcttgctgaacagctgtcactcggcatgaaaggcgagcttcctaaagactgggatcaggaagttcccgtttatgaaaaaggcagcagccttgcttcccgcgcatcttcaggtgaggtactgaacgggatcgccaagaaaattcctttctttgtcgggggatctgctgaccttgcgggttcaaataaaacgacaatcaaaaatggaggagacttcacggccaaagactacgccgggaaaaacttctggttcggtgtccgtgaatttgcgatgggcgctgcattaaacggaatggcgcttcacggcggcctccgcgtattcggcggcacattctttgtattctctgattatttaagacctgccattcgtctggcatcattgatgggactccctgtcacttatgtattcacgcatgacagtattgccgtaggagaagacgggccgactcacgaaccgattgagcagcttgcttctttacgcgcacttcctaacctttctgtgatcagacctgctgacggaaatgaaaccgcagctgcatggaaggttgccgttcaaagccaagatcatccgacagctcttgtattgacacgccaaaacctgccgacgattgatcagcaggctgaagaagcgtatgcgggcgtggaaaaaggggcttataccgtttccaaagcaaaaaccgattcaccggacgcccttcttttagcgacaggctctgaagtcggacttgcgatcgaagctcaagcgaaactggctgaagaaaacattcacgtatctgtagtcagcatgccgagctgggaccgctttgaaaaacaatcggctgagtacaaaaacagcgtgcttcctccgaatgtgacgaaacgtcttgcgatcgaaatgggttcaagcttcggatggggcaaatttaccggtcttgaaggagacgttctcgcaattgaccgtttcggtgcttcagctccgggagaaacaattatgaaagaatacgggtttactgcagaaaacgtagttgaccgcgtgaaaaaacttctaaacaaataacgagacaaaagaggatgagtcaaatcatcctctttttcctgtttatgcgacaaaaatagaaggggcggcgtaacagtaatagacaattctttcttttctccttttgtataatagaaagcaataacgaagcgctgtaaaaggggatgaggaaatggaacgtcattactatacgcacctgataaaggatgagtttgcgaaccactacttcgggcgggaaacggctatgtttgagttgtttcgagactatcattggacagatctgacaccccaggaatatcaaatgacagaaaagcaagttcaatatataacggaaccgattccggtgatacatatgcatcagcggctccagctgcatttaaaccgaatgagttacagccgtttggattccatttaccggcttacactgcccggagaaaagggccgcgccaccttcatgatgaaagacagtttaattgagattgcggcttcgggagattatgaggcggaaacgattttctttgagattctgcgtaaaatcagcccctgttttcttgcaatggatttcaagacacggcgctacgggtggttaaatccggtcagggaaagaaattttgtctaaaaacgaggaaaaagagatgtaaatgttgtataatagcctttggtttagtacactttaaactagacaacatgaaggaggaaataaaatgactttatgggttggcatcctagtgggcgttgtcgcattgctcataggtgttgcactcgggttttttattgctcgtaaatatatgatgagctatttgaaaaagaatccgcctattaatgaacaaatgttacgcatgatgatgatgcaaatgggaatgaaaccttctcaaaagaaaattaatcaaatgatgaaagccatgaataatcaagcgaaataatacgtacagattatgatatagagatacatggttataaaaataaaaaacccggagagggttttttatttttgcgtcatgtttcaccccaactgccggtgtgcagttctttttggtattgtatgagaaggtggtcaagctcctggctgagttctatcgtaatgtttgatgtcattccgtttgtcatgacgattttaagcagctctgcccgttttttttcaatttcatttaatagatgctctctaatcacagggatatatcctttcatacataaatctttcacctgagtcgctattattatatccacatttatactgtttttcaaataagaaggagtataatatctcgatgtcaaattaaattatataagctttttctataaaaagtaatccttctcgggaaagtgttaaaaaaatgaaatgattttgtcataactcgaagggagtgtgtcatcgtgagttttaattactttctgacgtttggggccggatttctgtctttcatttctccatgctgtctgccgttgtaccccgcctttttatcttacataactggtgtcagtatggacgaggtgaaaacagaaaaggtgatgctgcaaaagcgtggcctcgtgcatacactttgttttttgcttggcttctccgtgatttttatcgcattgggatatggaacttcgtttatcggcagtttttttacccaatatcatgaagcgatccgccagtttggcgctatcatgctgattcttttcgggctgattactgccggtgtgtttcagccgaaattcatgatgaaagagcggcgcattcactttaagcgccgtccggaggggtttatcggttcggttctgatcggtcttgcgtttgcagccggctggtcgccgtgcagcgggcctattttaggagccgtgttttcgctggcaaatacaaatccttcttcagcagtgccgtatatgtttttatatgttctcggttttgcgattccttttcttgttctttcattttttattaccagaatgaattggattcgcaagcatcagctgcttatcatgaaaatcggcggcattcttatgattctgatcggagttatgctgttttttaactggatgagctacattctgatcgttctgtcaaatcttttcggaggatttacgggtctgtaacggattaataacttttgaactattatataccctttcgtttttggtacaataagactagttaatgttaaatatgtggaggggaatatgacacgagttttagttgtagatgacgccaagttcatgagggcgaaaatcagagagattctggaaacggcgaattacacagtggccggagaagcggctgacggcgaggaagccctggcagtatatcaaaaaatccgtcccgacctggtgacaatggatattaccatgccggtcaaaaacggtatacaggcgctgcaggatattttagcttttgacccgaaagcccggatcatcatgtgcaccgccatgcggcagcagcggatcgttctggaagcgattgaattaggcgctaaagactttatcgttaaaccgtttgaagcatctaaagtgctggaggccgtaggccgggtaacgggaacgtaaacgtgttctcttttcaaattggttttttttatgtttttggagtatagtatatagtatcaaactccgtgcaagcaaaggaatgataaagatgatgattataatttcatccgttattgcagcggccatggccatttccgtgatgatcgtcaggattaaagcctccgacaagcccgcttcacctaaaaaaataattctcccgccgattttcatgagtacgggagcgcttatgttcctttttccgattttcagagtgacgggcgaagaatttttggaggccattacgctgggcgtgatcttctctatttttctgattaaaacatctaaatttgagattaaaaataatgaaatctatttaaaacggtcaaaagcgtttgtgtttatcctgattggtttgctggttatcagaatcgctatgaaatccattttgagcacgacgattgattacggagctttaagcggaatgttttggattctggctttcggaatgattgttccgtggcgcatcgcgatgtttatgtcttaccgcaaactttcgaatgaactgaagaccgctgatattcagatgaattaaaacctttccgtccgccggaaaggttttttatttgagcagggcctgataaggagtaagatcaatctgtttttcgcggagatgcttttttaaaaattgatgatcacgcttaggagtggccagtatgtaacccctgatgattaaatcacgatttatttgttcagcttcctccgctaaggaaagttcaccgatttttccggcgattttcgctttggctacatcccgaaagagctccggcacgggagcgaccaattcatccaaaaacgccttgtcacccgcattccataagtgcctgcttttttcaatataatagtcctgccaatccagttctgaccggccgtcttctttcggtaagcgttttaaaaattttcggaacataaaaaatccgccgatagacagcaatccgatcatcacgatgacccaaaataaaataaaccacataaaccagccttctagcattgttctatctcctccttactttaaccatattgtaaacgaagacagaatagaagaacacatgaaaaaaagaatagaaaaaatgatagatgtccagtcaattcggttgctagaacatattctatcgtatagtgattctgctatttggccatgggagattcactttgagggtatatgactgatatgaccggacaaaaaagccgcttccattgagggatgaaagcggcttttttatgttatagaggaaattgaaaggaaaatgaggcaggagtctcattaggctccttgttcatggagacggtcagaatatggttggtgaaatcagtgaaaatatgtttgtcattcagataaaaaggaagcaccatttgtttgtttaatgtccgttcaagcgttttaacagagagcataaactcatttcccgaaagagtgacggtgatcgcctgcacctgcttcagggccgtcaggtcggcttcaatgatatactgacggcttgtttcatatagatcgatcggcagcgtctcgtcataccaagcatacgggtcctcgtaaaactgccgcagccattcttccgtatcatcaaattcttcagcgttttttgagtgattcatggaagcattcctccatattaaaaagccttgctataacgtatgcagaagctttaaatgggtgaatggcacaaaaaaacagacaccggggtctgttttacatatcgtggcttgtattatgtttttgtcttgtatggttgcggtttttcacttttttgcttccgctcagcggttccggctggccggggttatggcccttcggagcatttttatgcatatctttactcgtatttttatttgtcatgttaaagcctcctttttaaggtgttccggctattggtttgtttttctttttttattgttctgccgttcttcttccgtcaggacgagctggtcattttctatataacccgcgcctttgccttggcttttcgcatcattcatgccgttaattacatgattggctttccgttttaccatgatcatcacctcaacattaatatggctctttacagcccgttgtatgaggcggaaaatcggacaaaatttaccgaaaatatgctgataagacgatcttattgtatttaataaaaacattgatatttacttatgtatgattttatactaagatgaaattgtgagaaaattgtgatggaatgtgaacattcatctaaagaacgatcttgatcattgaagggggattttggagaatgacaaatcagcaaaaagtcgcaacacaagacgttttccaagcaagaaaaacattttcttcaaatgggaaaacatacaactactattcattaaaagcattggaagacgcaggggtcggcaatgtttcaaaacttccttattctattaaggttcttttggaatccgttttgcgtcaggtagacggacgcgtcattacaaaagagcatgttgaaaatttagcaagatggggtactgctgaattaaaagatatcgatgtgccgtttaaaccgtcacgggttattctgcaggactttaccggcgttccggccgtagttgacctggcatctttaagaaaagccatggcctctgtcggcggagaccctgataaaatcaatcctgaaattccggttgacctggtcattgaccactccgtacaagttgacaaagccggtacggaagatgcgttagccattaatatggacttagaattcgaaagaaatgcagaacgttataaatttttaagctgggcaaagaaagcgtttaacaattatcaggccgttccgcctgcaacaggtatcgttcaccaggtaaaccttgagtttttggcaagcgttgtccatacgaaagaggaagacggagaacttgtgacctatcctgatactttggtgggaactgattcccatacaacaatgattaacggaatcggcgtcctcggctggggtgtcggcggtattgaagcggaagcgggaatgctcggccagccttcatatttccctgttcctgaggtcatcggcgcgaaacttgtcggaaaattgcctaacggaacgacggcgactgacttggcgctgaaagtcactcaagtgctgcgtgaaaaaggcgtagtcaataaatttgttgaattcttcggtcctggtgttgctgagcttccgcttgcggatcgggcgactattgccaatatggcgccggaatacggagcgacttgcggattcttcccggttgacgaggaagcactttcttacctgcgtctgaccggccgtgaagaagagcagatcgatattgtggaagcatactgccgcagcaacggtttattctatacgcctgacgcggaagagccgatttttacagacgttgtggaaattgatctgtcaaaaatcgaagcgaacctttcaggcccgaaacgtccgcaggatttaatcccgctttccgttatgcaggaaacgtttaaaaaacatcttgtcagcccggccggcaaccaaggattcggagcggatgctgctgaagagaacaaagaaatttcatttaaacttaacagcggtgaagatgcggttatgaaaacaggggcgattgcaatcgccgctattacaagctgtacgaatacatcaaacccttatgtattaatcggtgccggattggtagccaaaaaagcggtagaattaggcttgaaagtgccgaattatgtgaagacttcacttgcaccggggtctaaggttgttactggatacttagtcaactcaggtctgcttccttacatgaaggagctcggctttaaccttgtggggtatggctgtacgacatgtatcgggaactccggcccgctttctccagagattgaagaagcggttgctaaaaatgacctcctgatcacttctgtcctgtcgggtaacagaaactttgaaggccggatccacccgcttgtcaaaggaaactaccttgcgtcaccgccgcttgttgtcgcatacgcattggcgggaactgtaaacatcaacctgaaaacggatccgatcggcgtcggaaatgacggacaaaatgtttatttcgatgacatctggccgtccatggatgaaatcaattctctcgtcaaacagactgttacgccggaattattccgcaaagagtatgaaacggtatttgacgacaaccagcgctggaacgaaatcgaaacgacggatgaagcgctgtataagtgggaccaggattccacttacattcaaaacccgccattctttgaggaaatgtctgtagagccgggaaaagttgagcctttaagaggacttcgcgttgtcggcaaattcggcgattccgtgacgactgaccatatttctccggccggagcgatcggaaaagacacaccggcgggcaaatacctgcaggaaaaaggcgtttctcctcgtgactttaactcttacggctcacgccgcggaaaccatgaagtcatgatgagaggaacattcgccaatatccgcattaaaaaccaaatcgcaccgggtacagaaggcggctacacaacacattggcctaccggggaagtgacatctatttatgatgcctgcatgcggtataaagaagataaaacgggtcttgtcgtcctggccggaaaagattacggaatgggctcttcacgtgactgggctgcaaaaggaacaaacctgctcggcatcagaacagtcattgccgaaagctttgaaagaattcacagaagcaacctcgtcttcatgggtgtgctgccgctccagttcaaacagggcgaaaacgcggatacactcggcttaaccggtaaggaagtcatcgaggtggatgttgatgaatctgtacgtccgcgcgacttgctgactgtcagagcaatcagtgaagacggtacggtaaaaacgtttgaagtcgttgtccgttttgacagtgaagtggaaattgattactatcgccacggcggcattttacaaatggtgcttcgcgataaaatgaaacagtagcagaatgaacaaaagagagaaagcagtctgctttctctctttttatgcgggaggcttaagatgcttgcgaaatggctgggcggaatgttacttatcgggttgttagtatatgcgggctggaacatttattccgtgcaaaaaagtccgaaagaagggacagaagaagggatgaaagcccctgactttacacttgatacattgtcaggaaaaagtatctccctatctgattataaaggaaaaaaagtgctcctcaatttctgggcgacgtggtgcaagccgtgccgaatggaaatgccggatatgcaggagctgcagaaagaatatcctgatattgcggtagcagccgttaattttacgtcttctgaaaaaaatatacaggctgtgaaatcatttgctgatcattatcagctgacctttcctattctgattgacaaaagcggaattaacggggatttcaacgtgctttcttatccgacaacatacatattagacgaaaaaggaaccattcagcacattcgcgtaggcacgatgacaaaaaaagaaatgaaagaaaaactggatctcaaatagaggttcagtttttttattgtgaagggcttaggttttgaaaaattggaaaaaatgaatgaaaacacggaggtgagaagattgaaaaaaatgcgaaaacgttcttttcatgaattggttatggaaaataaacgtgagctgatgaccaatacggaatatttgaatcagcttgaagaaaagctggagcagcggttcaaacaaaaataacctttaatttgcagtcatgtttgcacctccttttgcaaaatatactcttaaggagggatgaacatgggcataaacaagaaagacggccagccgcaatacgctccgagccacttagggacaaaacccgttaaatataaacgcaacaaaggggaaaagtttcatgacaagtcaaacggacatccgattgtcatgcagacgaaaggcgaataacatcatcaaaggagagcagacattatgacaaacaatgatcaaaaaccgaatccggatgaccgttccgataacgttgaaaagctgcaggatatggtgcagaatacaattgaaaatatagaagaagcgaaagaatcaatggaatttgcgacagatgaggaaaaacagcgcattcaagaaaagaatgccagacgcaatgaaagcattgaatcgttccgcagtgaaattcaggatgaatcggctgcaagagaaaacggctatcaatcataataaaaaccagggaaacctggtttttttctctttccggctcgttgtgataaaatggggctaatctgataaaaagggagcagagaacgttgcatgtgtcaaaaaaagaaatagaagtgcgttatgcggaaacagatcaaatgggcatcgtctatcatgccaattacttagtctggatggaggtcggcagaacggcgctgattaaggaactcggattcctttacaaggatatggaagatagaggagtgctgtcccctgtattggatatcagcatttcttataaaaagccgctccgctacggtgaaacggctgtcgtacatacttggattgaagaatataacggatttaaaaccgtttacggctaccacatctataatccggatcaagaacttgccatcaaagcgacatcctctcatatatgcgttgataaagagagcttcaaaccgattcagtttcgcaaggcttttcctgattggcatgccgcttacgaaaaggcaaaaaaataaggagcggctgcacttatggcatttggaattacgcgtaaggaactggaaagatggaagcaggatgtatcggaagggaaaatcgcttttttaacgcattactggctggacgaccgctttccggaggctaagaccgtgacgaaggccggttcaagcgatctcaataaactgatcagatggggagcggagtacgggctgaagccggagtggattcaccataaaaatgaatttccccactttgacctgctcggagaaacgcaaagaagcatattagaaaaagaacgtctgactgatcacctaaaaaggttcaggctgtaaaaaaaagaacgcatccgctgcgttcttttttttacacgtaatcaaataccggctcttctgcctgatctgaatatgtgactgacaaatcgtgattatcaaagtaccataagtcgctttcttcaataaaaaaggtaatgccttcaacttccgtgctggtgccgatgttcatcggcaggtcttttaaaatgccgagagaaaagcctttctgaacgttgctgcatcccccgtaacggacaaagaaacggacatggtcgcctgtttccagatcgagctcttctttgtaccaatccagcgcgcctttcgttactttcatgttcatccggaacactccctttttgtttctcatataaagaaattatctctattataaacgcatatggcattttgatgtcaaaattgaagtttcatcaaaaccatttgatcttcggttctgttttgtttataatccgtttgatgtttgccctgtgtctgtagataacaaacgcggtcaagagcgtcactacgattaataaataagggtcttttacaaacagacagtaaataatcgtataaatccctgttaacattgaagacagagaaacaaatttcgtaaggaataaaaatacgaaaaatactgcaaccatcgtaacgaataacagcggagcataaaacagcaggacgccccctgatgtggctacggctttgcctcccttaaactttgcgaacacggggaatacatggccgatcactgctgccacccctgcgagaagaggatgaatggggacgtgcagtaaatatgggagcgccgcggccagggtgccttttaaaatatcggctgcgacgacgacagatcccgctttaacgccaagcgtgcgaaaagcatttgtagcgcccaaattgccgcttccgtgttctctaatatcgatccctttcgcaagtttgcctacgactaaacctgacgggatgctgcctattgcataggccaaaataatcaataaagcaatcaacatctacatttctccttttcaatgtcccttcactctattttaacacgagttgttaccgtctgatgacaagttttttgagaattaagctgacaaatcgctttttttgattccggcgaagcggtcatgtacaatatatcaaaaggagatggtaaagatgcaaaatccttcaaaatcagagattaaagaaattctggaccggagcaaacggatcgcggtcgtcgggctgtcagatcgtcccgaccggacttcttacatggtttccaaagcgatgcaggatgaagggtatgaaattattcccgtcaacccaacgattgatgaggcgcttggcgttaaagccgttgcttcattaaaagacgtggagggaccgattgatatcgtgaatgtgttcagacgctctgagcagcttcccggcgttgctgaagaatttttacagacggacgctcccgttttttgggcgcagcagggccttgcaaatgaagaagcgtatcgcatgattacagacaaaggacggacggctgtaatggatttatgtataaaagtcgcccgcgctgttataaaataggaacaaaaaaggcaaaaatccttggcaaatcaggggtttttgcttttttattgaaagaatactctttgcgtatgatgatgaaacagatacaataaagcatgaacagcttttttagaaacccctttatacaggggtttgcagtctgtttgcgatggccggcataaagctatataatagaaagcgaactcatgttcttatctgccgaaaagggcaccaaaaagatgaaaagccgttcgaatgtatgtcttgcggcctaaaaaacgagccattcgcttaaatatgttgcgaaatcaagcatattggttataattgtgagtccgaggagaattggaccgaagcttgcgcatactgaaaaacaaagacatgaaaacatttaaaaaagagaatgattaagagcaggttttttgaaaggggtttgtacgtttggctagaaaacagcaatttgattacaacgaagatgccatacaggtgcttgaaggcctggaagccgtcagaaaacgaccgggaatgtacatcggttcgacggacgcacgcggcctgcaccatctggtatatgagatcgtcgacaattccgtcgatgaagttcttgccggctacggagatcatattatcgtaacgatacataaggacaacagcatctccgttcaggatagaggacgcggaatgccgaccgggatgcataagctcggaaagccgacgccggaagttattttcaccgtgctgcatgccggggggaaattcggacagggcggctataaaacaagcggcggtctgcatggtgtcggcgcatctgtcgtaaacgcattatcggagtggctgacagttactattgagcgtgacggatatgtctataaacagcggtttgaaaacggcggcaagcccgtgacttcacttgaaaaaatcggaacgaccaaaaaaacgggaacgcttacccattttaaacctgatccgtcaatgttcagctcaacggtttataattttgacacgctgtcagaacgtctgcgcgaatcggctttcttgttaaaaggtttgaaaatagaattaattgatgaacggaaaggcgtaaaagaagtattttattatgagaacggaattgaagcatttgtcgcttatttaaacgaggaaaaagacgctttatgcgaagtggtgtcctttgaaggcgagcatcatgacattgaagtcgatttcgcgtttcagtttaatgacgggtattcagaaaatatgctgtcattcgttaataacgtcagaacaaaggacggcggcacccacgaatcaggagccaaaacggcaatgacaagagcgtttaacgagtatgcgcgaaaggtcgcccttttaaaagagaaagacaagaaccttgaaggcgccgatatcagggaaggtttgtccgcaatcatttccgtccgtatcccggaggaactgctgcaatttgaaggccagacgaaagggaagctcggcacaagtgaggcgagatccgccgcggatgccgtcatttctgagaatcttgcttatttcttggaagaaaaccgcgatacggcaaccctgcttgtcaaaaaagcgattaaagcaagccaggcccgtgaagcggcccgtaaagcgagagaagaagcgagaagcggcaaaaagcgcaaaaaatcagaagcgacgctgagcggaaaactcacaccggccggttccagaaatccggcgaagaatgaattgtatctggtggagggagactctgctggaggctctgcaaaacagggaagagaccggaaattccaagccgtgctgccccttcgcggaaaggtcatcaacacagagaaagcaaagcttgcagacatcttcaaaaatgaagaaatcaatacgattattcatgcgatcggcggcggtgtcggcgcagattttgatatagaggacatcaactatgacaagatcatcatcatgacggacgcggataccgacggcgcgcacattcaagtcttgctgttaacgtttttctaccgctatatgaaacctttaatcgagcacggaaaagttttcatcgcccttccgcctctttacaaagtgagcaaaggaagcggcaagaaagagattattgaatatgcttggtccgacgaagaaatggacggcgttttaaagaaagtcggcaaaggatataccatccagcgctataaaggtctgggagaaatgaacgcagaccagctctgggaaacgacgatgaatcccgaatcgcgaacgctcgtcagagtcaagatcgacgatgcggcacgggtagagcgccgtgtaacgacattaatgggagacaaagtagaaccgagaagaaaatggattgaaaagaatgttgccttcggattagatgaggaaagcaatattttggaaaatgaaaacttgtcggtcgctgaggaggtttaatagtggcacagccagaattatttcatgatttaccgttagaagaagtaatcggcgaccgtttcggacgctacagtaaatacattattcaagacagggcgctgcccgacgctcgtgacggtttaaagccggtgcagcggagaattttatacgccatgcacgcagacggaaatacattcgataaaaatttccgtaaagcggcaaaaacggtcggaaacgttatcggtaattatcatccgcacggtgacagctccgtttatgaagcgatggtgcggatgagccaggattggaaagtgcggaatgtgctgattgagatgcacggcaataacggaagcattgacggtgatccgccggctgccatgcgttatacggaagcgagattatcttctatcgcgtcagagcttttgcgtgatattgataaaaatacggttgaattcgttccgaactttgatgacaccagtaaagagccggttgttttgcccgccatgttccctaacttgcttgttaacggatcaaccgggatttcagcgggctatgcgactgatattccccctcatcatctgggtgaggtcattgatgccgtcattaaacggattgaatctccggattgcactgtcgatgacttgatgcaggtgattaaagggcctgactttccgacaggaggcattattcaaggagtcgacggcattcggaaggcttatgaaaccggtaaaggcaaaattattatccgcggcaaggctgaagtggaatccgtaagaggcggacgggagcagatcgtcattacagaaattccgtttgaagtaaacaaagccaatctcgttaagaaaatggacgaataccgcatagacaaaaaagtcgaaggcatttctgaagtcagggatgaaactgaccgcacggggcttcgggtggtcgttgagttaaagaaagaagccgatgcaaaaggcatcctgaatttcttatataaaaacactgatctgcagacaacatataactttaatatggtcgccatacataaccgccggccgatgctgatgagtcttacggccatcctggatgcgtatatttcccatcagaaggaagtggtgacaaaccgctccgtctttgaattacaaaaagcaaaagagcggcatcacatcgttgaaggactgatgaaggcactgtccgtgttagatgaggtcatagcggtcatccgggcaagcagcgacaagaaagatgcgaaacaaaacttaatttctaaattcgcatttacggagccgcaggccgaagcgatcgtatccttgcagctgtatcgtctgacaaacacggatattacggcgctaaaagaggaagcggaagagctcagcaagaaaattcaggagctcgaagccattttaagtcatgataaaaagctgttaaaagtcattacaagcagcctgaaaaaattgaaaaagacctatgctgacagcagacggtctgtcattgaagaaaagatagaggaaattaaaatcaatcttgaagtcatggttgcctctgaggacgtatatgtgacagtcacaaaagacggctatgtaaaacgaacaagccagcggtcatttgccgcttctaacggccaggatttcggtatgaaggatactgacaggctgattcaccaatttgaaatgaatacaacggatgttcttctgctctttaccaataagggaagctatgtttattgtccggttcaccagcttcccgatatcaggtggaaagacatggggcagcacgtaacgaacatcatcacgattgaccgtgatgaaaccatcgtgaaagctataccggtaaaagaatttgatccatcttcatatttactgttcatgacgaaaaacggtatggtgaagagaactgaaatgacgcattacaaagcgcagcgttactcgaaagcgcttgttgcccttaaccttaaaggggatgatgagctgattgatgttcatgtcacagacggcggcagccagctgtttatcgccacccgcctcgggtacggtttatggttcggtgaagatgaagtaaatgtagtcggtgcccgtgcggccggcgtaaagggcataaatttaaaagacggtgataccgtcgtatcagggcaaatcctgcatgaaacagattcgcttgtcctcgtcacacagcggggagcaatcaaacggatgaacctatctgaattcgaaaaaacatccagggcgaaacgcggtgtcatcatgctgcgtgagctaaaaaagaacccgcatcgggcagtcggcgtatttgcgtgcgctttggccgacatgatcgctgcggaaacagaaaaaggcgagagaatcgaaatcgccgtgaagtccttgcgggcgaatgaccgatacagcaacggctccttctttaccgatgaagatgagacagggccggtaacagatgtatggcgtatccctgcatacgatgtttaagagtaaaaataaaataaaaaacctccgctcattgagcggaggttttactatttagctttcatggctgccgaataagtcagtgatagcgtgaatgacttcgattccctgccatacaaataaattcaatgcagtgaatgaaaacaaccctaaaatcaccattcgtaagataaacaacatgtttaacaacctcctcattttatgttacatagataggcgatgttgaacatgaagctcatcgaaatacgaggactgataaaatttagcgattaaaaagcttttctttcgctgtcttctccgggaagcggggcgtctcctgtctgatatcacaatcagtgagacagaagcggcaaaaagcgccgtcaagatatatgagcccgtcagcgattttttctcatcatcagcattttggccggccttcatttcgtgcatttcctgctggtcggctaccgctttaaaatgatgagcggtatcaaacgcatggggaatggagagcaaatgaaagcttgcaatcgctaaaaataaaatagaagcttttaaaaacaagatttttttcaaatgttctcctcccttcataagtctgaatatttttattataataccctaatttaaatgtaaagtaaacacatttattaaatttaaaaaattattatcctggttaagtatataccattccatccatcttttcatctcttttttcttaaagacctatttgttatgatatgcacgcattccttataacgtgacaacatttttcaggctgtaagataaaaaacggggcatgacagcaaaagatgtgatgaagaaaccgaaacattttcttaaaaaaacttctcaaccactgttgttgtgatataataatacccgttgtgttaaaagatctaacatatacagcaaaaatgacagtaaaagatatgtaaaagggaggttaaacatggaggctttcatcagtgaaatcataaatgttccaaatgattttatttggaagtatcttgtttatattttagtcgggatcggattgtactttacgttccgttttcgctttattcaattccagtacttttttgaaatgttcagaatcgtcggggagaagccgcaaggaaataaaggagtgtcttcaatgcaggcattctttatctcagcagcttctcgtgtcggaaccggaaacttgaccggcgtcgcgctggcgattgcaacaggcggtcccggcgcagtattttggatgtggatcgtagcgattgtcggtatggcttccagctttgtggaaagcaccttggcacagctgtataaagtgcgttccggtgacgaattccgcggcggtccggcatattacatggcaaagggactgggcgcccgctggctcggtattttattcgccgtattgattaccgtttctttcggacttatatttaacgcggtgcagtcaaatacgatttctgtggcgtttgacgaagcattccatgtgaataaaacagttatcgcaatcattttagctgtattaacggctttcattatattcggcggtctgaagcgtgttgtttccgtctcgcaattaatcgttccggttatggcgggaatgtatattctgatcgcgctgtatgtcgtgattgtaaatatttcggcggtacctgagctgcttgttacgattgtgaaaaatgcgttcggtcttgagcagatcgtcggcggaagcttaggaagcatcattattatcggagcgcagcgcggcctgttttcaaacgaagcgggaatgggaagcgcgccgaatgccgcagcagctgcacatgtgtcgcatccggctaagcagggattaattcagaccctcggcgtgttctttgatacgtttatcgtttgtacatcgactgcttttatcattttattgtacagcgttacgcctaaaggcgacggcatccaagtgacgcaagccgcactgcagcaccatctcggcggatgggcgccgacatttattgcgattgcgatgtttttattcgcattcagctcagtcgtcggcaactattactatggtgaaacgaatattgaatttattaaaacaagcaaaacatggcttaatatttaccgcgtattcgtcgtagtgatggtggtatacggatgtttggctgacttccagatcgtctgggacatggcaaacttgtttatgggtctcttggctctcattaacttagtggcaattttactgctgagtaatgtagcctacaagatctataaggattatgccgctcagcgcaaaaaaggtcttgatcccgtattcaaagccgagaatactccggagctcaagcatattgaaacatgggcggaagaagaaggtacaagccctgaacgtaagactgctaactgaggaaacatgcatacaattttcaaaaaacccccttacattttgttgtgaggggttttttatgtgaaaaaccgggttatttttactggaaacagatttttttgaatttattgtatttttctcttgtatatgtaagtgctttcatataaagtttaactaaaccggtttaccaaaccgatttagtcttaaaggaaaggagtattgatgtggcttctgattatggcatttttacgatcggtgatgcgatgatcaccttaaatcccgcaagcacaggacctttgcgttttgttacccattttgaacgaaaagcaggaggagctgaactgaattttgcgattgcatgcgccagattgaacctgcactcaaagtgggtcagcagactggggaaggatgagttcggcagagtgatttatcagtttgccaaaggagaaggaattgatgtgactgacgtctcctttgttgaaggctttcctacatctttaaatgtcaaagagatcagaaatgacggttcaggcaagacgttttattatcgtttcaattcaccaattctgactcttgcaccggaagatataactgagaatatgtttgacggcattcacatcgttcatcttaccggtgtgttcctcgcgcttggtaagaaaaatcttgaaattgctgaaagggtgctttccatcgccaaagcaagaaagattcccgtatcttttgatccgaatatcaggctgaagctgtggacgattgaggaggcacgtgcggcatttcatcaaatctttccgcatactgatattcttctggcgggccgggacgaaatgaaacagctgacaggtataggagaaaatgaagcattagcccggtttgcagagagctattcaatcagtcagcttgtcataaaagacggtgaagcgggttctgcgctgtatcatgatcataagtgggttcacaaagaggctttcccggttgcgcctgtcgacacggtaggagcgggtgacggctttaatgccggctacctgtacagttatctacatggttttgaaccggaaaaacgtctggagtttgcaaatgcagtcggtgcgctcgtcaccacagtttccggtgacaatgaagggcttccctgcctagaagaggttctgtcatttgtaaacaaagagactgtgattgaacggtagcaagcacaacttaaaaagcgggtgaaaaaatgaaagcggttcaagtacggaaagcatttgatctgatggtgacggaatgtgagaaaccgtctgttgtccacgcggatgatgttcttgtcaaggtgaatcgggtcggaatttgcggatcagatttgcatatttatcatgggacaaatccgttagcgtccctgccgagagtaatcggacatgaagtcacaggggaagtcgcaaagaccggttctcatgtccggcgtttcaagccgggtgaccgggtagtgattgaaccgatatcttattgcggaacatgctatgcctgccggaaaggacgtccgaacgtctgcaaagcgctttcggtgttcggcgttcatgaagatggcgggatgcgggaatatatcgtgcttccggaaaagcagctgtatgctgtttcgcccgatctaccctgggaggaagcggtcatggcagaaccatatacgatcggcgcccaggccgtttggagaggccgtgtcgagaaggaagataccgttttgattcaaggagcggggccgatcggaatctgcatattaaaaatggcaaagttcaaaggcgcttccgtcatgataaccgacttgaatgatgaacgcttggccttcgctgaaaaaaacggtgcggatgttaccgtcaacgcgcaaaaagaagatcccgttttgcgggtgaacgaatggacaaaaaatgaaggcgctaatgtcgtcattgatgccgtctgtctcccctcaacgtttgaaacgtcaattgacgcagtgtctccggccggtcatgtggttgtgcttggttttgatgagaggactgccggcatttctcagcttccgatcacaaaaaaggaagtcacgatcaccggttcaagattgcagacgaatcagtttccgtacattacagacttactgaataaaggcctgttaacgcacggcggtcttattacacatacattttcagcagatgacgtccatcgagcatttcagttgatcgaacagcacccgggcaaggtgggaaaagcaatcattacgtttgattaaaggaggagcgagaatgctgcctaagtacgccatttacgaaaaacttctgcatgcacaagtggtggctgtcataaggggacaaaacagccaagaggcgcttgaagtttcaaaagcggccatttcaggaggtatcagcgccattgagcttacatacacaactcctgaagtggaagatgtctttaaggaactccggcatcaagatattcttcttggagccggttctgtaatggataccgaaacagcgagacacgccattttatcaggcgcctcatttatcgtcagctctcattttgtaaaagagatagcatctctatgcaaccagtacagcgtaccgtatcttccgggatgcatgagcgtgtctgatatggctttggcgctcgaagccggatgtgatgtggtaaagctgttccccgctaattcgtttaatccctcatttatcaagtcggtcaacggccctctgccgaatgtccgcattatgccgaccgggggtatctcattaaacagcatgaatgactggctttctgccggagcggtcgcggtcggagtgggaagcgacttgacaaaagcatatcaaaagggcggctatgaagctgccgtatccctcagcaaagaatacgtctgccgaaaaaacgaatatacgggggtgtaacatgaatatcacgtttcgctggtacggccaaggtaatgatacggtgacgcttgaacatgtcagacaaattcccggggtcaaaggcatcgtctgggctcttcaccagaagcccgcgggcgaagtatgggaaaaggaggacattgaagccgaagtcagattcattcaatcctatgggtttcatgcagaggtcgtggaaagcgtgaatgttcatgaagccattaaactcggccatgaagaacgcggacaatatattgagcactataaacagaccattcgcaatctgtccgaattcggcgtgaaagtcatctgttacaatttcatgccgatttttgactggacgcgtactgatatgttccgcgcactggaggatgggtcaactgctttgttttttgaaaaagcgaaagtggaaagtctccctccagaagaactgatccgcacggttgaagaatcttctgatttgacgcttcccgggtgggagccggagaaaatggcccggatcaaggaactgtttgaagcctatcaaacggtcggtgaaaaacagctttgggccaatctagaattctttttacatgaaatccttcctgtagcggaggaacacggcattcaaatggccattcatccggatgatccgccttggtcaatttttggcctgccccgtattatcaccggtgagaaaagttatgaaaagctgcgagagatttcagattcacccgccaactgtattacgttgtgcacgggttcgatgggagcggatcccgccaatgatatggtgaagatcgccaaacactatgcgggagctgcgccgtttgcccatatacgaaatgtgaaaatctgcgataacggtgattttacggaaacttcgcatcttaccagtgatgggtccattgatattatcggtgtggtaaaagaattgcacggccaaggctacaaaggatatgtacggcctgatcacggccgtcatatctggggcgaacaatgccggccgggctatggtttatatgatcgtgccttaggaattatgtacttgagcggactgtgggatgcgttctcgtctcatgagaaagaggtgaagagatgagaccgattcatggacgtttatcaggaagaaccgctgtcataacaggcgggagcggtgttctctgttcagcaatggcaaaggagctttcacggcaggggatgaaaattgcgatcgtcagccggaatgctgataaagcagagcgtgcggcgggcgagattgctgatgctggaggaaccgcggtttctgtaccggctgatgtttcagcccgtgattcgctcgaaaaggcaaaagacgagattatcagccggttcggctctgtcaatcttttaattaacggagccgggggaaaccacgctgatgcgatcactgccaatgagacgtatgaagaggatgagcagagcccatcattttttgatatggacgaaacgggattttccagcgtattttcaagcaactttaccggtgcatttctggcatcgcaagtgtttggaaaagaccttttgaaggcggaatgtcccgcgattattaatatttcttctatgagtgcgtatacaccgatgacaaaggtgcctgcctacagtgcggctaaggcggcggttcagaattttacgatgtggatggctgttcatttcgcgaaaaaagggctgcgggtgaatgccatcgctccgggtttctttttgactgcgcaaaaccgtgagttgttattacaggaagatggaagtctgacagaccgatccaataagattatggcacatacaccgatgaaacgtttcgggaaaccggaagaccttctgggaacgctcctgtggctttcggatgattcatactcaggctttatcaccggggtcaccgttcccgtcgacggaggttttatggcttattcgggagtgtgacagaatccagttccctgtcagattgtaaactatttacttctgacttatactagtgaaaaatgaagacagacggggatgagtctatgaaaaccattacaatttctgatgtggcgaaatatgcaaacgtatctaaaagcaccgtatctcaatttttaaatcagcgctatgactatatgagcgagaaaacgaaacaaaaaatagaagcggccattcatgagctgaactatcagccgaatttcgtcgcccgcagcttaaaacagaaatcaacatttacggtaggtgtggtggtggctaatattcttcacaccttttccactcaggtcatcagggcggtggaagactattttcatgaacaaggatttcatattattgtctgcaatgcggatgatgaaccggaaaaagaaaagaaatatattgaaatgctcagggccaagcaggtggacggaattattatttttccgacgggcgaaaatctctccttatatgaaaagatgaaacgcgatacgtttccggtcgtgtttatggacagaaccattgaagaactcgggattccgacagtgatgcttgataaccatcatgcagccggtcttgccgttgaccggtttatcgagagcggcattaagagaatcgcgattattacgacgtccattattcgggaaatcagtccgagggtagagcggattgaagggtataaaaaggcgcttgacccccacgggatgatggtgcggaacgaatatatcaaaacagccgatgcggctgatatttccaatgttttgtcagagctgttctcacttcaggagcctccgaaagcgatattggcggcaaacgatatcgttcttgttgaggtgctgaagtatatgaaggagcatgatatgacaatcccggataaggcagccgtcatcggaattgatgaagttccttttgcgggtttttttactcctccgattacgacgatcgtccagcctgcggcagaaatggcgcgaaaagcgggaagccttcttctttgccagatacaagaaaaagatagcggtgaaaaacggattcaccgctataaaccggcgcttctggcaaggcaatccggataaccggtttcattacataaaccggtttactccggcaatttaaattatgaaataagagggagggattttatgttctcaaaggatagattccctattcttcttcttttattttcagccggggtgattaactatttagaccgttcagcgctgtctattgcggcgccgttcatacagcaggatctcacattgtctgcaacccaaatggggctgattttcagcagtttttctgtcggatacgctgtgtgtaacttccttggcggtgttgcatctgaccggtacggggctaaattgacattgtgtacggcgatgatcgtttggtctcttttcagcggggcggttgcgcttgctttcggatttgtaagtcttttgattatccgtgttttattcggtatgggcgaggggccgctgtcggctgccataagcaaaatggtcaacaattggtttcctccgtctcagcgcgccacggtcatcggcctgacaaacagcggcacgccgctcggcggagcgatttccggcccgattgtcgggatgattgctgtggcattcagctggaaggtttcctttgtcctgatcatgatcgtcggtttagtctgggcgtttatctggtttaaatttgtcaaagaacggccggcacagacggaagacaccccggcaatgaaagcggcggttcaatcgcatgagcagcatatcccgatgaccttttatttaaaacaaaaaacggttctcttcacggcttttgcctttttcgcctacaattacatcttatttttcttcttaacatggtttccgagctatctggtgaaagaacgcggattaagtattgaatttatgagcgtggtgactgttattccctggattcttggatttatcggtttggcggcaggcggaatgatttctgattatgtatacaaaaaaaccgccggaaaaggggttttgttctcacggaaagtcattcttgtcacttgcctgttcgcttccgctgtactgatcggatttgccggacttgttaccactgccgtaagtgccgttattctcgttgctttatcagtcttctttttatatataacgggctctatctattgggcggtgattcacgatgtggttgatcaaaggaatgtcgggtcagtcggcggctttatgcattttcttgcaaacacggccggtattatcgggcctgctttaaccggctttatcgcggataaaagcggatcattctcgggggcgtttttgcttgcaggcggattagctgttttggcctcggctgcggtaatccgttttgtgcgtccgattatcattcaaacagtttctgaagataaaaaagacacgataccttattcataagtcatcaaagccactgaggctgtcctgccgataacgggatggccttttcgttctcccgcttgatctgttcctatgataatataggaattgtttacaaaagaagggaagaggagggagcatgaaacagaagccgatatatgtcgaaatcaatattgcatctgatatagaaacgctttgggaatatacgcaaaacccgcatcttcataaagaatgggatctgcgtttttctgacattacatatcttcataggctgccagatgaaccgcagagatttctatatgaaacacgaatcggttttgggctgaaggtatccggcacgggcgaatcaataggtgacataaggcctcgcttgtcagaaagagtgtcttcgctcgcttttgcctctgatcatccgctgtcacttataaaagaaggcaggggctactggaagtatacagagcgggataacggacaaacctcatttttgactcaatatcaatatgaaacggcccgcggtctgccgggaagttggatagaccggtttttatttcgtcctctgctaagctgggctaccgcatggagctttgatgcgttgcggctttggatagaacaaaacagacatccgaagatatcggtccgtttcggatttgtctatgtctgtatgtgcctcgtattcagtctgtattggttttttcaaggctttcatgatggctgtgccgatgcagagatcgtgaggggaacgctggagacagggttaggggtattatggctgcttcccatgcggagaaagtggctgattcacgccgggcagtcagtcttcttttgtgtaacggcactgttatattccggcggcggattcttgatttcattaggagtccttacgatagccggcatgattcttaagctcaagctgccgagcgcctggcatacaaaacgaaagagagaagtgaaatgacggattcaatgtatgaaaaaacgattactcattatcaatcactgcacccgatgctgcagaaacggtacagatttgacggatcacgcacgttttgcggagaaggcgttatgtcagaaataaagggaggttcttttcttgtcagaatgcttttaaagaccggtgtttttttcagatgttttttctcagagaggggaaacgatatcccttttactatcgaaaacaaaaacaggcaaaatggcgtggaatggaatcgtacctttttctttaaaggcaaaacgcgtttttttgatgcggtcatggaatatgatgagcgggaaaacagaattcttgattacttcggcaaacctcacatcctactgtctgaactgcatttagaagcgtcttcagacggagggcttgttattacatccggaaggcagtggctcctgataggcggaaagaaaatcccgattccggcatggctgtgcgggaattcaaccgtttatgaggcttatgatgaggaaatgaattgcttcagcataaaggttcatgtgaaaaaccggatactcggcacgcttttctcttaccgggggactttccgggaaacagagggagaaacatgctgaagcgtcatctcatggtaagcgtggtttgctttttgggatttgcggcggctgaagctccgcatatatcagctgctgagacgtttgttttattttccgtgctttttttcgttcccgctgtattctgctttgcttttcggccgtcaaagaccttagagaatgtgtggttacggagttatcctgttgccgctatatgtgcggcgcttgcgcttgtcacaggcttcagcttttttgcctttgtgtggttcatttatacgcttggactggcactgtatgctgtccgccggctgatgaaaacaaatattcacagaacagaagagatgtcagttatggcgggtttcatttatttggccgggggcggattctggttcttcgcatatgtccttgagattcccgtcctgaatttcggcccgcttatcgttctgctgacggcggtgcactttcactattccgcttttctcattccgatctttaacggattgctcggcaggatcatacgggagaaacgcggactttaccggtggagcacagtcattattttgatttcgccggtcctaattgccttggggattacattttcaaagacacttgatgtgattgctgtcgctctgtatcttgcgggtctgtatgtaaatgcatatctcgtctttaaggcgccgtttgttacgaaaacaggcaggatcttgatcaggagttcttcggctgtgttaatgatcacaattgctttttctttgatatattcgtacggtgtctaccgcgaggaggcaacgctcacgatcagccagatgatttggattcacggggccgtcaatgcatttggcgttatcctgccggctttggcggggtggagaatagaaaatcctagaccgttcgatgagaacagtgaaagaacgttcagcagaatttacgggaagggaacgataggcaaagattttttgactgacattcatgcagcaaatgacatccattataccggccttcaggatcagctgagagaactgcattctgaagacttttcaactgaaaagctggcgccggccgttatttccttttatgaaaagacaattgattatgacatcatggcgaaagtgacgtggagcggttggtttcgtccgttcgcgcgcgtgtacgagccgttcagcagaagagcgggacagattcatctgtccatgaatccggattggtatatcatgcacagtgatattataggagttgactctgataaagacggcagaaaaaatgtccgtgcatggatcagaacaaatgaaaagcaggaaaccgtttttactgcgctgtattcagcatacaggtcaaaaggggaaggatacatgaatatctctcttcctctgccgtacggccaaatgacgggcattttaaagccttatgcgcgtaagcagaatcttgttttgacaagcagacggcgaaaaagcggagcgggtgatgaagggatttatctccagacgaaatgggggacgtgtcatcttccgctggcagagacatttcttatttcagcccagagcgaaacaagcctgaaggccgttcatcatatgtggctgttcggactgaaatttttaactgtgcattatcggatcactcatgcttccgcaggtaaccgaagcaaataataagctgcagagccgtctgtttatcaggcggctttttctcattatatgaatagataggaagaagataatgcacccggaagtcaattcatattagaggatgtgatgcgttacgaaagacaaggtgctttttctcattgtcacgtttatcttatggagaaagttttttgtcgttttggaccgggagcggcctcggtcttgcggtctttgcctgtctctcacgattcgtgaaatgaaaacggctgcaaagattcctacattgagcggtatgatgaaggcagccgggcagatggccctgctgaaaatcttgttctttttgtttatgattacgcggaaaaaagcagggaagatgcggcaaagtattatcagacctgattttttatatgcttgcctaaagaaatgatctcattgcgggtaatgaccaaacaagaaattcatttcaagcttgcttttgcgttaggtttttcagctgaatcaaaactagcgctgtaaacatttattgcagttataaatttctcttctttgtctcaataactaaagtatacttggtttatgagacttgtaattcatttctctgtataacttcctagaatatatattatgtaaactagaaattgtgaagagaatatataagtgggtccatattctaacagcatcccctttttgtaaggtaatattaaaaaacctctacgtaaaatcctttgatacattaaacgggcgcccatctttacgcttatacatcgtgctattctgatggccgatgcttaccaccacatatcccacgcttgccaagtctgtacagatcactgtgccccattctggagaaccgcccccgccgcaaacatagaataacaccggatagcgtttttccttcccggagagagcaaggccgtcgtaacattgggtcttgatatctatagagtaagcattcttccgcgcagtgagaagcggctgctcatcaagcatttcgcagacttcaggaaacatgtacgttgatgtagtcttcccttcgctgctgtcggacggatagtacacaaacaccgtcagttctctttttgtatgatctgatgccgtgtactcaaaatccagttgtgtgcggccgacagtatagccgccggttggctctggaaatgcgtcataccttttcattctcttgttcccccttaagtaataaaagtggcgggtgtaaaatacatacattgcgctataaacgcttttcaaaactgtgaaacgattacattatatgtacagtcatatctacttcttcacgtaaacctccatgtattgctgtttaagatgataaaagcggacatcgttgctgatgtccgcctaaagcttaactaattgggttctgttccccaaatcagttttccttgatgatataatgtgatttttttcgttgttttaaatgtatttgattggaaaaaggaataatcgtcgctttgtgcataattactccagtcatcattgtgaagacgaagctgaatattccctgtgcttgctcccggtgacagcgttcctgttttaaaacccagttccagataggtatctgcaccttgcttaggtttatgcagcgtcacaaatttgtgggtcagattgccgcatccaatctgcgcgtagtcacagtcaaagttttggcccttgtttttcgcgttataccagtaacgggcagtgacatcttttaaatcaaccgtcgcattgccgttattttttatgtgaagctgcgggcggatttggttgctgttcacacccccatcccctgctttgtattgtacagaaatgccgttttcctgtgcggggttatcttgtgctggcgtttcagggcgttctttcgttgaatctttgttgccgagaatgttttctcttacgaatgttcctgaagcagttaaatctgtaagcggccagccgcctgttttagatgctcccggctttaacgctgaggatgattcctgcttatcagaaagattccagttcacccagctgatgttcttgctgtcgagataattcagccattcccgcgactggtcaaggaatacaccgccatttccagacgcgtcgcttgttccccattccgtcacgaaaataggcgctcctttactgagtgcatagtttgctttatcccgtaaagattggccgtgtgtgccggcataaaaatgaagcgcgtacatgacgtttgcatcttttagctgatcatcggctgcatcattcacatcttggctccatgtaccggttccgacaatgatgatgttgtctggatcatttttgcggataacggaaatcacttcttccgcatacggtttaatatcacgcttccagttcacatcaccgtttggttcgtttgcaatttcataaatgacgtttggcgtgtttccgtaaagacttgacatttccttaaaaaattcttttgccttctctttatgttggtttgggttgccgtcatttaagatatgccagtcaatgatgacatatatcccaagttcttttgccgcttcaaccgcttcttttactttatttttcacggacggattatcaatataaccgccatctgccgtatacatcgccgcgcggaaaacggttatgccccaatcgtctctcagccattttaagctgtctttattgacaaaatcgccataccattgcaatccatgtgaactgatccctttcaattgtaccgctttgccgtcccggtttacgagctgtgttccttttatgctaagctgcccattcttggctgctggcgtttttgtccctgctgcagatgcctgggaagcctgcaagccgcccattgtcaatactgtaatcaataaacacgtaataaaaatagaaattgaccgtttcatatctgatcttttcctccttcgcattattttggctcttcacttcttatgagctcgaactcattgtaaaaatctttctcatgattgtctatcaacctaatttcttgtttttgggaggtttaaaagcctgtcaatttgctctaactctattgaataagacacacctgacacatatagaacaaagaaaactggactgaatcgggactttacacgttatttttcaatcgaatcgaaaaattaaatgtatttccgacgtagacgctctaaatgtaatgtgatgagtctcaatatggcattgaatcttatgattgctgtaagaagacgagcccttgcccgtccttgttaatttaaggttgatgtaaggttcggattaatacgggttaaggttggagttgtacaataagattgtacttcagtgtgggattcagccagaagaattcccccttcaataaatcatagaggtgaaaaggtttgagagaaaataaaattttgtcttcattatgttacttcagtatattttttgcgccgtttctgtttccgattatcgtctatttcttaagccgggacgatgtgaaagaacatgcgaaaaaatctttgtggacgcatctgattccttatttgatttttggaattggcatcatcgcttcaggtttacttggtatgaatgatatcagacatgccgggcctttcctgcttgcgacttatgctgttacattccttgtggcgatctattttttcatttggaacattgtcaaaggaatcaaagtgttttcggaacaataggaaaaaacggttctgttattaatcagcagaaccgttttttttgtatagccattatgataattgtatatctatcgttgtcccttctcccgcggtgctgtgaatggtgatgtcccctccgtgcttttggataatatcctttgctatggccattccaagaccagagcctgcatgcgtcgttcctgtatttgtccccctgtaatagcgatcaaacactttttccagctcctcttcttctatccctttgccgttgtccttaattgtcacatgagttcgttctttttgttcaagctgtacaacgatcttcacatcgggatcattgtgaacgagggcatttaaaatgagattcgtgaccgctctccgaatcaatatcgcatcaaggttcagcatcagtttttccaggttcgtttgaagctcaatggacttatccgcatatctcgaatcgtttaaaatatcaattaacgtttcccgcagcagcgatacaaggtttacccgttctttatttaacatcacatcgttgtttttcagccttgtcgttaaatttaaatcttccatcacatctttcatatagagcgatttactctcaatgatccgggcgtaatctctgatctgttcgactgtgagatgataattcggatctttgatgatttctgcatagccttgaatagatgctaatggtgttttaatgtcatgagaaatatgactgatccactcttcacgcatttgctctaatttatctttttcttttttgcttaaagatagttgttccgataagtgattgacattatagaacacatctttataaatgcctttggatttcattttgatcgtataatctccattagctaaccgctggattccttgaatgacacggccgagcggttttgtgagctgccggctgaatagatagccaatgagtaacgcgatcaatgcatctattgataataatatgatggttcctgtattgaacttcgtcacaaattccttggtatcatatgagaggacaaattttccgagagagggatttttaaaccctataaagtaactgtactccttgccgtttactttttttccgccggcgtaaatggttgataataattgttcatccttatatttatgtaaatttacaatttcaataggcgtatattttttcttcagtcctttaggttctctatcatgataaacatcctgtccgttttcatctaatatttgaatccatgcattctgctcttttaaagctttttggccctctttgtttactgtgatacccttgttcgataacgtgacatattgtccgaatgatcttgtgaaagtttcaggtgtactttcttcgtcatgttggctgttcgcctgtaaaacgagccaaaacataaaaataaataaattaatgaagactgtaatgatggtcactatgatgacagataccatgtatctgcctgttaatcgccaattcatccttacgcatcctttacaacaaatttgtagcctaaccctttcacagtgacgagaaagtctggttttgatgggacagtttctattttctcacggagcctgcgtatatgaaccatcaccgtgttgtcagaaccgaaaaagtcttctccccatacagcttgatagagtgtttctttactgatcacccgattgggatgctgcagaaaataggccataagcataagttctttaggtgttagctcaatagccgcttcatttttggtgagctcggcttgttgttggtttaattcaaatggccctttttttatcacggttccggtttgagaaggctgtaagtaagagacccgtctcagctgcgctttgacccggtatgcgacttctttagggctgaaaggttttgtaatgtagtcgtccccgccgatggcaagtcctacaattttatccgtttcctccccctttgcagacaaaaagataataggaatgtgtgaaatgtcccttatttgcttgcagatatcatagccttcaccgtctggcagcatgatatccaatatcacaagatcgggattttcttgatgaaattgagccaatccgtcacgggcagttgaagcggtcactacgcgatcaatgccttctcttattaatacggttttgatcagttccaaaatttctttttcatcgtctatgattaatactttgctgtgaagccgtgacatatattgatcactccttgaagtcattgtcattattatacccaatgtccgtgtatcgttaaaaaatcaacattctctcccacagaaaataagccaattttcttttccgagtaagaaaattggcttaatgcaatgctgatgcctttaacgctttacaacaaatgttgtcacgctttgagccggcagatgggcccaaaaatgattatccgttactttgagatccgttccaggttgaagattgctgctgctgctcgtgatccatctggatacttgcgaagcagacccattctgcaacacgaagttttggttgacccctgtgttatttttattaatggcaacaatcacgactttattgtctcctttataggctgacacgtaaacattcggttcaggatttttcgttgcatcaatccttacatagccagggcgcacaaattttgagaaatgagccatattgtatccgcgtttgctgatcgtcccatcttctttcatcgggccgtatgatctgcggatgtaccaccacacataagcttgaaaatctccctctaccattgaatgatgaatatgctctgaaacacctaaagcctcaggccatcgatccgccgagttgttatcactgttcggatagtatacttccgtcatccaaaggtccttccccgctcctttttgtttgaaaagaggataaggaaactgactgacctgagtgccgtacaggtgggttccgaggatatccatattcctaagcgcctgcggatcgttcaaaatggggtccgatatatttttcaggtattgaaatgattccggcgcaatcacacgggcattaatggaaccggcattctctctcatgaaacgcaggatttcttgaggcgtccaccatgtccattcgtgagcgtaatcaggctcgttctgcatagaaatcgcatacagattcacaccattactcttcatgaaattaacgaaatcgttaagatgctgtgcgtatgcggcgtacttatcgtatctcagccgcttagctgatgtgtcaccattatgattgaaagtctcaaccatatcgtttggcggattccaaggggaagcaaaaacgattgctccgtgtttgatcgcactctttgcagtctccacttccttgtaccaattatttctattctcatctacatgaattcttaagaccgaaaaacctaactgattctgtccattgccaaaagcggtctcccgttgagccgcagtcaagtctccaatccaagccgggtgattcattcctccaaaaccgcgaatcacttgtctttctgcagatatattaactgttgcatcacttgctgctgaaacttcagtaactcccggtcctaacagcatgacggacagcattgtgaaacataccaataatacacaaattggtttttttacgctcgacatcattttttcctctccttcatttatcttttatagacttagaaaacgtacctttgcttatctttgtgtaaactgccagtaatcaacattaaacaagtttcctgtaccagttccggtaaatacaaagaatacgttgtgaacaccggatgcgccgcttaccgcagtttctatttctctccaggattgcgttccgcctgtggaagggacattcaaggttccgacaagcttaccgtttgcactgtctagtcgcacttctatttttccgccgagagcggacgctacatttgctttaaacgtcctggcaccgcctgacccgaaatctgcatttcctacagcaatccagtctccgttatgaatgtttgtgacatgttgattattgaccggcccgccgggtgctgaggatgcctctgtcaaaatccgtccgttccaggcaaacgtttccgcttctacccggttatatggattcaagttggatagctgtttgacacctgcaaaatttgccgctacctcttgcagggagccatctggattatgcacaagcttatttatatggggagaacggtatcctttgccggccccgtaaagagcggagctgacagtttgagtatgatacaccacataccactcgtttttaaaattaaaaacagcatggtgattgtttccgccgcctccgaaaaatgctcccggatttttcagaaagtgccctctatacgaaaaagaattcataggacttgagctggtcatatagccgatctcacctggaggtttatcggccgggtgcgcgcccccgaaattgatacaataggaatagtaatattttccgttatacttatgcattcccgaatcttcaaacataaaaggcgcatcaatcgtagatgcacttccggcaacactggtcatatcaggccctaatttcatgactcttgctgttttaggattggcccattgtccctgcgttggatttgaaccgcccggaacgcctccgccggcatataggtaaccggtaccgtcatcatctacgaatactgccggatcaaaaagccatacaacaccggacattcctggtgtacttggcgtcaccagcggttttccgatcggatctgtccacggaccggtcgggctgtctgcggtgagaaccccgatacctccgccgccgtttgcgaaataaaggaaaaatttatccttaccgttgatctttttcaccgcggctgacggggcccatgatgctcctgcccatttggcaatcccccggccgccattcaccccattggcacccgctgcgggaatcgctccgtgatctgtccagttcaccatatccgctgaagatatgacggatattttattcaaattggcaaatgaattatccttaatcgtgccgtcgctattatattcatagtcatcgcttgacatatagatatagactcttccgttataggtcagcgcaaacggatccgcgcccagatgatggtcgataagcggatttgaattcccaacatgttttgcaattggagtgctggcagcatacgcagacttcccagtgaagcaactcaataataaagcaaggacccataggcatacgcaacattttttacacataacttaacactcctcctttttctttaaattcggggaacttttaccatttgagaccaaattgcagtaccggcagtaaaaagcagactccgcagttaagcaactcaataatagagctagtacccataaacatacgctacacttttttctaataacttgacatccttctttttccttaaaatgtatgatgatttttttaccatttgatgacaaccagtcatggagaacggctctggagtaagccttgcgaacacaggagtatgactctcgcctttttaataaaaaacgccgctgagtgccaggccagcggcgttttacacttgatcacttacattttgtcaaacttcgtgtcgccagcaaacgatcctattgacagttgttcttcaagaacaagtccgtgatgatgccgttcttcaatccgtttaataatagatcgaattgcatccgtattttcttcgatattgtgaggttcaaagatcgtcacgtgatctccttttaatttgtactcaagataatgctgtgctgttgattgtgtccagcccctatcatcggttacatcgccgcatagcaaatgatggatgttggcgttaacggcgccggaattgatcagttcattgtgatacgcaagatagcctctgattttatccttaatcgaaggaatggttaatatttctctgtagtagtccggaataatgtccatattcagatggacgatctcttggatttcctcttccgataaatgagttaccgaatcggtgattttagaatccagcataatcacatcagatacggtgcgcccccgcttttctaaggctttggcaacctcaaaagccaaattcgatccggaagagtaaccaagcagaacaaaaggcccttgttcttgaatgcttatcatgctttctgcataccggtcaacgatctctttcccatgagacggctcttctaagaaatcagcggcatagatggtgctgacgccgtcaagtcttttcgccatttcattataaacgagtccatacccgattaaaggcgggaaacagaacacagggattgaatcttcctgattcagcttgacgaatacgttatccgtctcggattcgaaaacggccgcttgaatggcgcgtgccattgtttcgatggtaggaaaatcgtatacggcttgataatgcatgttgattcccatactggcgttaatttgatgaatgagctgcaatactttaagtgaatggccgccaacgtcaaagaagtgatctttaatcccggggtcaggcagagctaaaatatccttccatatatcggccagctgcttttcaattaacgttcctggcgctgcgtattcggttccggtaagcctatttccctcaggagccggcaacgcttttcgatcgatttttccattagcggttatcggcatattctctacttgtacaaaataagccggaatcatatacgtaggcagattgttcagcaaatgacgcttcagctgcgccgtatttaatgactcgtctcctgacaagtaagcgcacagctgttttgagccctctttttcaatcgcgatgacgaccgcttctttgacagcatcgagttgtagtaaagatgcttcgatctcgccgagttctatccggtagcctcggattttcacttgatgatcaattcttcccaaatactcgatattgccgtcaggcagccatcttgccaagtcgcctgtacggtacatcagcttccctgcttcatatgggtgagctgcaaacttctcagccgtcagctccgggcggttcaaatagccccgtgcgagcccgtctccggcgatacacagctctcctgccacaccgagcggttgaaaatattccgattcggggtgtacgatatacaattgaatgttggaaatcggtttacctatcggaactgagttaagcgtttctcccgcttcgcattcaaaatacgatacatcgatcgtcgcttcggtcggcccgtataaattgatgatttgagcctcacccgccggtgtgatcaagcgatgaaaccccgcaacgtgcgcaggcgtcaaagcctcgccgcttgcaaatacatattttaatgatgccagctttctctttaattcctcgtcggatttttgctccatggactcaagaaaagcatgcagcatcgcaggcacaaaatgcataatggtgacatttttctgcgcaatcgtatctaagatgacgtcagggttcttttctcctccgtttggaagcaataccgctttagaaccagtcatcgaccaccagaacaattcccacaccgatacatcaaaggtgattggggttttttgcagaatgacatcctgcttatccagcgggtaatgtttctgcatccaaacgagacggttgattacggatcggtgttccaccataacccctttcggtcggcctgttgatcccgaagtatagataacataagctaagtgattcggtccggcagtctgtttcaagtttgaaccatcttcccaagagaatcgcggatcttccaggtcaagcacttttcccgtaaaaggcacgcttttcctcaagtgactctgtactaacaacagcttcgtatccgaatcctccaatatatagtgaatccgttcttccggatagctcggatcgatcggcacatacgcgccgccggcttttaagattccgaagagtcctacgatcatttccaaggaacgttcggccataatcccgaccggctgatccggctgcacgccttctgattgcaatgtccgggcaagttgattggctctttcattcagttcccggtatgtcagctggctttccccgtatacgacagccgtttgatcaggcgtacgctgtgcttgttcctcaaacaatttatgaagcgtcttttcctttggataatctgcttccgtatcattaaatgcctctataaggagcgaacgttcatcccccgtaagtatatccaagtcttggacgcgaatcgcctgactgttcaccatctgcttaatgatttgcataaaatgctcttccatccgcttgacacttgcatgatcatagacgttgctattgtatacaaaatgaatgtcgatttctcccgcgggcatgacaatgaaattgaaatcgtaatgggtatgctcttccatatggaaattgataatgtccagtgcgtcacgattcggtttcatatgctccatttgtttctcgaccggataattttcaaataccatgatatgactgatcagctgctgcttttgttcagtttgagcctgaatttcatataacggaaatgtatcatacccttgagaagccaatgcctgctcctggctcattttcaacacttgttccacagtcattccaggctgagcggtaatacggacgggaatggtgttgataaataagccgaccatggactcgatacccggaatttctgccgggcggccggatacaaccgacccgaaaacgacatcctgactgttgttgtacctttgcagcaatagtccccacgcactttgaatgaacgtattcacggtgacgtgatgcttgcttgcagtctgtctgatttcttctgacagctgttttccgagccggcatgcaagcctttgtttttgatatcccttggcttggtttgagacaggttctttcagtaaaacagtttgtccttcataaccgtccaaatatttttgccaataggctgaagcgtgcttatgatcctggtcttccagccattcgatatatcggctgtacggggtgacgacttcccgctccgcttttcttctatcaagaatcgcataataggtttcaaatacttcattcgtaataagaggcagacaccagccatccattaaaatatgatggaagctccatatcaatcggacttggtcatcctctgtacgaaggattgatacgcgcattaatgcatcttggataaggtcgaatcctcttgccttatctttttgtacaaagccggcaatgaactcgtttcgttgtttattcttcatgcttcgaatatcttcaacagttatttcgatcggtttttttcggaatacgatctgcaaaggctgatctttccattccgtataaaaatgagtccggagaatctcatgtctttccgccagctgcgacaaactcattgtaaatgcctcgatatccaagccgcctttgagatcaaaaacggcttgttcaaagtaagctctggaagccgaatcgattaaactatggaacagcatacctttctgcatgggagttaatggatatatattttcaatctcgccgatatgttgtgtttgctgaacaaattgatctaattcctcgattgttatgtccttcagtgagatatcgcttggcgtcaggtgaatgtcttcttgagctgcgcaatgttcgatgacttcttttaggctgttctttaagagagctgcacatgtttccatcgtttctcttcgatattgtttaccgctgtaactgatggccaatgacagccggccgtctgagatcatgccgttaatgtcaagcgtataggcaatgggatgtctgtcgcttgcaattttccctccggagtaaggagatacttcgattcctccattttcgagatcttgatcaaattgtccgaggtaattgaagctgatttccggatgtccggtccattctgatgccttcggatgatcggacgaatatttcatcaggccatatcctattcctttttggggaatctgacgcagctgttctttcaccgtcctaatccgctgggagatgtcccggtctgcctggatttgaagagaaaccgggtattgggttgtgaaccagcccactgtacgtgaaatatcaacgtcttgaaaaatagattccctgccgtgtccttccagatgaacatgaatttcttcatgccccgtccagcgatgaacagccattccgagtccggtcagcaataaatcattaatgtcagtcgtataggccctgttcgatttttttaataaatgctcggtttcttcctctgtccattggacgatgatcgtttcccggtcttcggccagaccggtctcctgctcattatcctttggcaatttgtgttgcgagatatgtttctgctcaagccaatattgattttctgcttcaaattccggactttctgcataacgtttcaatcgttcagcccataacagataggaatccgtcttcttagggagcgtgagcgcttctccgttttggagctgctcataagctgacgttatatcctcaagtaaaatcctccacgatacgccatctacaaccagatgatgaatcgcaatcagcaaatgatcgccatcctgacattgaaacaatcccagtttcatgagcggtccatcggctaaatggatggattgctgaatgtcatttgctatcgtttctatcgtttcggcagggttgttttcttcgagtaaagagaacacgtcgaggctgaataattctccttcactgatcccgcgggttctggcttcgtattcatgatctccctgaacatagaccatgcgcaaagcatcgtgatgctcggcaatcttcttcatgactttctgaagcttcgattcgtccaaaccccctttaaaataaagcatgacagattgattataatgatgcggatcagggtattgccgggcgaaaaaccaatgctgaatcggcgtcaataaggtacggcctttgatctccccttgttctgcgattcgggtaatgggctcaataaaaggagcaagcccggagatcgtcgggtgtttgaacaagtgtttgatgtcaagcttatacccggcttgatataagcttgaggtcacctgaatcgacttaatcgaatctcctcccagctcaaagaaatgatcatcgattccgacctgttctgcgcctaataccgattcccacaccccggccagtattttttccagttctgtccgcggagctgtataaggatttccagtgagatttcccgttggagcaggcagagcctgacgatctatttttccgttggaagtaagcggcatcgctgccagctgtacaaaataagcagggatcatataggacggaagttgccgggacaggcgctcccgaatttcgcctgcggttaaagaatgctgtgcggtataataggcgcacaaggatgtttccccgttggtttcttgtgccgtaacgagagcttcttgaatcggcggtatttggaaaaatgcggattcgacttccccgatttcaatgcggtaaccgcggattttcacctggtggtcgatccggcctaaatattcaatatttccatccgggagccgccttgctaaatctcccgtccggtacattttcacctctggcacaaaggggtgctgcaaaaatctttctgctgttaattccgctctgttcaagtatcctctggcgatgccgtccccgctgatatagatttctcccggaacgccggccggcaccggcttcatgctcttatccagcacgaaaatgttcatgttgtccgcggcggttccgatcggcactgattcccgtctgtcgttttgcggatcaaaggaataaatcatacagccgacgactgtctctgtaggcccgtattcgttaaaaatttcgatttttccgccgaattttccgctgatgctacgggcgagccgcgtgcttaaattgtcaccgccgacaatgaatttccgaatggtgcactcagcagggatattcatctctttcaataactgcaagtgcgccggggtcagcttgataatatccgtccttgaatcctgaataatgcaatcaagcaaggcagcactgttttctcctccgtagacaataatggaatttcctgtaattagcggagtgaaaacagacgttatcgtcagatcaaaagcgatggacgaatataggggaaagttggttttttcccctttgacatagacccggcgggcccaccaaatataattggttaagccctgatgctcaattgccactcctttaggcttgcctgtggagcctgacgtataaatgacataagccaaatccttcgtactgctgatcggttccaggtcagagccgtcttcgtggtaagagctttcctgatcgaggaaaaccattgtgcccgcaagttccaactgtttttgaagatggctctgcgtcaggatgatatcagcttgggagtcttctgctatatactgtatgcgatgcttcggataatccggatcaattggcacataggcccctcccgcttttaaaacggccaatattcccacgaccagttcgatctcatgctcgcaaataatcgcagtgagccggtccgtctttaccccctttttccttaacgttcgggctaattgattggcacgttcattgagctgacgatatgtgaattgcttttctccgtaaataacggctgcttgatccggtgttcgtttcatctgttcttcgaataactgataaaccgtcttatcccgcggatattcagttttcgcagtttgaatgtcaacgagaagtgtatgtgtctccgattctggcaaaatatccacttggccgagggggaggtcaggctgaaataatatgacagaaaatagccggtttaaatgtccgagcacctgcatcatatactgacggtcatagacttgttcattaaaacataattttaggtcaatcaagtcttcacccatagcaaactgaaataaagcatctgcagcagccgtttctatgaaaccatcagaatgaatttgctctagtgaaacaactgtatggatgatcggcaaatgatttgcattgtagttcagcctcagctgtccggccattttatcaaagggaacgtcctgatataagatcgcttcgtccagcgtatgtttcaattcatggaaaattgatttaaacgtactgccggaattgatctgctgtttgattaacatgagctggtctgaacgaagatcttcatcagtttcgtcttcaaaggctggaacccctgtaatcactccctcatcccccgtgtatttgtataaaagggattcaattccgaccaggagaaccagatagacggccattggcgtttggttcgtcatggtcaggatgcgccgtgatacctccgcactcaatgaactgtgaatacagtcagatccgcttgttatatcacgctttactgttgagtcggacacttgaaacgaagggaatgcaccgggacggtcttccgtgtgaaacattcggccccagaacaactcctgttgtttgaattctgacattcatatccctccagttggtttcattcctgttttcaggcagctggcggcagccgcggcattcatgccgggacagccgctgcccccgtgattagaaatccaattcgattgtgcttgcgagatgtttacttttgtttactttttcgcttaattgaatgtcttttaaaggaatggatgggtttctcataatcgccgaaaggatcatgacgtaatccttggccaatacagcaatggttttctttttaaacagttttgtacagtaatcaaaactgccctgaatctcatcttgatctattaagaagttcagctgtaaatcaaacttggctgccgtctctgtttgttcataaggcctgactgcgagagagtccacttcaatatccgtttgttccgtattttgcaggacaaacatcgtatcaaacaatggattgcggcttaagtcccgttttacacccagtttttcaactaattcttcaaaaggatactcttgatgttcaaaagccttcagcatggtttctttcgtttccgttatataatccaaaaatgtcttttccgccatcggagcggtgcggatggctaatgtattgacaaacattccgataatgggttccaaatccgcatgcggtctccccgcaataggtgtgccgacgacgatatcaccctgaccgctgtatttagccagcagtatggaataggccgagaacaaaatcatgtaagctgtcgtcccggtcaattcttccagctgctttatcccttgggtgacagtcttatcgagcgtaaaattgtgccttttcccatcaaagcttctaaccggcggtctcgcaaaatctttcggcagctcaaatgaaggcagctcttcatgaaatacaccaagccaatacccttcctgcttcttgattcgttctctttgctctttttgatgtttccattccgtaaagtctttgtactgaatacggagcggagctaactctttgccgtcatacaattgaatcagttcttcgacaaaaatattcatggaggcgccgtccgtgatgatgtggtgcatgtcaaacatgaaaatatgcaggtcttgttctaactcgatgagtccggccctgagtaatggagcctggctgagatcgaacggccgcacgaaggtgcggaaacattcctcaacctcgtcagctgttgccttgtatctttccatcgaaaactccgcttgcggtttgatcacctgcaccggttctccgcggaccagctcaaaaccggtacgcagtgattcatgacgctggatcagtctttggaaagcggtttgcaagcgatttatgtcgagttttccttctaatgtaaggattcccggcatattgtagctcagttctccgccttctatttgtgttgacaggtaaaccatcttctgcacggaagatacaggatagacatcttttgctttggctttcggaatgtaatccggcccgttggtttcagctcctgcaattgcctttgccatttcctcaactgtcggacattgaaagacctctcttaatgaaatgtttttgctgaattgcttatgaattttggcgatgagcgtcatcccccgcaacgagtggccgcccaaatcgaaaaagttatcttttacacctatttcttttaccttcaaaacgtcttgccagatgcatatcagctgctcttccatattcgtccgcggagcaacgtagtcggttcccgtttgtaaacctgcttcaggcatcggtaatgctcttcgatttacttttccattgccggttagcggcagtttctcaagctggatgaagtatgaagggatcatgtatcccggtatttggccagcaagtttttctttcagctgactgatcgagagtgattgctccgctgtaaaataggcatataaatcgatttggccatcggtattttcttttgataggacaactgcttcctgtacgtgcttgagaagagcggcctccacctcaccgagttcaatccggtaaccgcggattttgacctggtggtctctccttcccgcatattcaatgtttccgtcaggaaggtaacgggccagatcgcctgttttatacatccgctgattcgagtcatatgggtgcggaacaaaagtttcgagtgtcaaaggctccctgttatgatagcctctggcaaggctcgctcctgaaatacaaagttcaccgacgattccgacaggctgaagcgttccggcttcattcaaaatgaaaatctccgtatttgaaatcggtttgccgatcggctgaagctcctgatctgtatcaggatcgacggtatacatggtcacaacatgcgtctccgacgggccataatgattatgcaatgtgacttgatggcgtgccagcatgtcacgcagcatacttgttacgatgagctgttctcccgcagcgatgatgtgatccacgcacgcggcaaacggttcgaaatattgtttctctgaggcaaggagcttaaggaacgctgtcgggaggaatgctgtttgtatcccgtgcgttctgacaaaatcattgagctgacgtatgtcacgttttgcctcattgccgatgataaagagtgttcctccgcttgaaagcgcggagaacatttcttgatagcagacatcaaagctcatcgcggcaaattgcagcactctgtcaaagcgaagctgcgtatgatcctgctcataagcgagcagattcgtcatcgtcttgtgctccagctgaactcctttcggctgccccgttgtgcctgacgtgtaaataacatacattaaatcattttccgagcaggaaagattaagattgtctgctctgccttgatatatcatcggatcatcaagctgaagcacttctccttcaaagcgcggcggaatagcgtggcctgcacaagtcaaaagcacaccggcgccgctgtctttcagcataaaagcccgccgtttttcgggaagctccggatcaataggaagaaatgctgcgccggcctttaatatggctaaaatgccgatgatcatatgtgctgagcgatccgtgagaacggcaacaacctgatcagtgcaggccccttatcttgaaggatgcgcgccagctgattggaacgctcattcagctgacgataagtcagtgtctgaattccaaacatgacggcttcatgatccgggttaagctcagcctgctgctcaaaaagctgatgaatcgttgtcggaattcgtttttccgcaactgcagtatcgttaaagagttgctgaatgtctccttcctcttccttggtcatcatattcagacgagccagctcggcatcaggctgtttaataatcgaatcaatcagctgcacaaaatgccccatcatgcgttcgatcgtttccggtttaaacagagccgtcaagtattccattgtgaactgaatacccgactcttcttccacagccgttaaggttaaatcaaatttagccatcgtatgttcgcttggatatggtttgaaagtgacgtcatttatctctaactgttcctgctccgtgttttgaagcacaaacatggtgtcaaacaatggattacggcttaagtctcttgcgatattcagttgatcgatcagcgcttcgaacggataatcttgatgctcataagcttttaatgcattctccttcacctcggacagatactgagagaacgtcttccctttttcagggtaatttctcatggccaatgtattcacaaacattccgataatcggttccaaatcggcgtgcggtcttcccgctataggactgccgacaattatgtcttcctggccgctgtattttgaaagcaataatgtataagacgcaaggagcaccatatataaagtcgattcagtttgggatgccagctgctttaacccggcgcttttttgcttatcaagcgtaaactgcattgtggctcccgcaaaatcccgtgccgacggccggatataatcggtcggcagatgaaggacaggaacgtcgccgctgtacagctctaaccaataggcttcttgattttggatctgttttaaccgcgcttcgccggtctgccatactgcgtagtccttatactggatgcgcaaaggcggtaatgtttctccttcataaatgcggataaattctttaatcaatacactcatggatgttccgtcagaaataatatggtgcatatcaaacatcagaattccgcggtcaggttgaagttcaatcagccccacgcgaagcagcggcggctcatccagatgaaatggacgaataaatttgcggatataaaggtccgcatcattttcttctgcctgataccactctgcttcgaactttgcgtgatctaagacatactgaacgggttctccgtcagccattttaaaaccggtgcgcaaagattcatggcgcaaaatcagcgtgcggaaggcttgctgcagcttgtcacggtcaagcttgccttcgacagccatcagtcccagcatgttgtaactgagttctccgccttccaagtgattcaggatgtacaaccgtttttgtgctgaggataccggataataaggtcttttttcaattgcaggaatcgcagcatatccggtcagctccgtcttcgtgatcgtctgtgcgagctgttcaatggttgggagacggaagacgtcccgcaaaggaatttggacatgcaattgcttttgtatttttgcaatcagcgccgttgcccgcagggagtgtccgccgatctcaaaaaagtgatctctgatccccacctgctctaacccgaggacatcttcccaaattgctgtcagctggatttcttccgaagtttgcggcgggacgtactctatgccgccgtcacgctttttgaccggagccggcaataactggcgattcaacttcccgtttggcgtcagcggcatcttatccagctgcacaaattgagccgggatcatatatcccggtaaatgccgggccattctttcgcgaagttcactgatctgtattgtcttatccgcagcaaagtatccgcacaagtaatattcatcatctgcatctttaagggcagctgcggcggcttcttgaatatcaggaacgttcagcatcaccgattcgatttcaccgagttcaatccgaaaaccttgaattttcacctgatgatcaatccggccgatatattcaatatttccatccggcagaaggcgggccagatcaccggttctgtacattcggtcctccggtacaaacggatcggcaacaaatttttcgtccgtcagttccggcaggttcaagtaaccccgcccgacgccgtcccctgcaatatacagctcgccttggacgcccgccggctgcagccgtttttttgaatcaagaatgtacatgcggtttctgcctaacggcttgcctatagggacatagttttggctgcgtgcccacgcattggaagaacattcaatgttgaacagagacgcgtctacgcaagtctccgtaggcccatatacattggtaatcccaggtgaagcgccatgatcgccgaataattgcatgagcttatttaccgtcgttttggaaagtgcctctcctccgattaaaagatgctgaagcggaactccctgcaaatcacctgcagctatcaaaagctttaagtgggcaggtgttccgtcggtgatgtcaatcgaatgctgccgataataacggcataaggcagcaccgtctgacacaatctctttcggaacaataaacaaggtatgtcctgacagcaaggaagcatacatttgctgaacagaagcatcgaaataatatggagcgagcatggctacattcagctccgcatcgtaggcagagtaaatttggcgtcgaagtccttcaatcaggtgaatgacctggcgatgttcaattaacgtgcctttaggattgcctgtcgtaccggaagtataaatggcataggccagttgactggactgataagagagtgcaagactgctgtctttttggtgatagaaatgttcctccatgagatcgatacatgttcctgagaagccgatgtcatcctgcagcttcccgcggtaaagcaatacgctgatgcttgaatcatttaaaatataactgatgcgttcagacggagaatcaggatctatcggcaaatatgcgccgcccgcttttaaaactcccaagatgcctacaatcatctcaagcgagcgttcagtcataataccgacaagcttatcgttccgcacaccttttgcctgcaaggttcgcgcaagctgattggcacgccggttcagttctccgtaggtgagttgtttaccctcgaatacaaccgctgtattgtccggagtacgatgcgcctgttcctcaaacagctcatgtatcgtttgttcaagcgggtaatgcatgtcattagactgaaagcggctgagcaaatgttctttttcttgcctagagagaagctccaattcttctattttgacagacggctgctgtaatacttgctgcatgagctgttcaaaatgtccgcagatccgctccacttctgatttttcatattcgttttcattaaaaccgaaatgaacggccagctgtttgccaggtatgacaactacattcaaatcatagtgggagtgttccagcatatgaaaattcgtaatgttcagctccgtactatgatgtcccgtctcttcgacctgctgaccgatcggatagttttcaaaaatcatgatatggtcaatcaggttctgcttttgttccgtttgggcctgaatttcgtataaaggataggtatcgtatgattgggaagccagagcgttttgttgaaccatttgcaccgtatcagcaaaagtgctgtcctcatcgcagcggatgcgaaccggaatggtattgatgaacaggccgatcatctgttccacatcaggaatttccgccggtcttcccgacacgacactgccgaagacaacgtctgcggacccgctgtatttctgtaataaaactccccataacgtttggatcaacgtatttaatgtaacctgatgctgatttgcgatctgctgtaattgttttgtctgttcgtgatcaaatcggcaggtcacattggcataggcgtattctttttgttcatgctgctctattttatgaagaagcgtggtttcacctttatatccttcgagatacccgctccagtaccgctttgccgctccctgatcttggcggtcaagccactcgatatagttgctgtaaggagctgccgatgacggttctggttccctgccttcttgtaaggcgcgataatgatcaaacacttccttcgtgataagagacaggcaccagccatccatcacaatatgatggaagctccaaatcaaatgatatttgcggtcttccatacggaaaatcgctatgcgcatcagcggatcccgagccaagtcaaatccttttgccttatcttctctttgataggctgcgattgcatcctctctcaggtgctcctctatatcacgcaaatctgcaaaatgaatttgcggtgtttgcgttttatagacaatttgtaaaggagtatcgttccagccgctgtaaaaacgggttctgagcacggcgtatgtttcaaataatcgttcaaggcttgctttaaaccaatcaatctttaattctccctgcaaatcgaacgatgcttgttcaaaataagaacttgaggcctcgtccagcaggctgtggaagagcattcctttctgcatcggagtgagcggatacacgttttcaacctcacctgcatgcggcagttgaatgaggagctgatccaattcgtcaatggacatgccttttaacaaaatatcgcttggcgtcagttccgattgttctctatggacgcaatgcgtaatgattgtccgcaggcggctttgaatcgtttccgataaccgcatgatcgtttcttttgcgtactgtttgctgctgtagctgatcgtaagcttcagccggccgtcggtgatcattccgtttatattcaatacatacggtctttcttgatttccgctagagtctgaaccgcaagaataagaagataattgaaccccatgctgctgtaaatcttggtcaaactgtcccaggtagttaaagctgatctcaggattgagtttcgatggcattccgccgcttaagtaccttgctattccatatccgatccctttatgcggaatttggcgcaatccttctttggtcgtcttgatataatcagagatctctttgcccggctgcgcgtgcagcacaaccggatacagacttgtaaaccatccgaccgtgcgggagatatctatatcttgtataatctgttctcggccgtgtccctctaaatgaatcggaatttgtttcagtcctgaccaatgcgatatggaaagaccgagagaagttaaaagcaaatcgtttatctccgtgttataagcgcgattcgcttgttttaatagcagctccgtttcctctttcgtccattccacagttgctgtttcactgtcttttgcagttgtatgggtttcatgaaaatctttaggcagcggtttgacttcggtttgttcgatctttgtccaatattcctgttcctgttttatggtttcacttttcgcatattctgaaagtctcttagcccataattggaaagagtctgttttttgcggcagttgaatcactcgcccattctcggcttgcttgtagccgctaacgatatcttccagtaaaatgcgccatgaaatcccgtctataatcaaatgatggatggcgatgagcagatgatctccatttgcgcattgaaacaacccggctttcattaacggcccatcacttaaacgcatactgctttgtatctcatcagctttggcttcaattgtccgtcccggatcggaatcttctttcagattcaggacttctaagcggtacagtccgctttgggcgatttcttcattctgtgcctcgcagccattttccgtagtccggaacgtcatgcggagcgcatcgtgatgttcagcaagtttttgcagggtttgacgaagctgcgtttcctgaaaaccttccggcgcatgcagcatgacggcttgattataataatgctgatctgtcgttatttgttcgaaaaaccaatgctgaataggagtcaggctgacttttcctttgacctcaccttgatcggctatacgcagattctgcttgatatgcggactcaattctgcaattgttgcatattgaaacaagtctttgatttccattttgtatccttgctgatttaatctggaggatacttgaatggatttaatggaatctccgccaaggtcaaagaaattatcaagaatactgacgttttcagcgcctaataccgattcccaggcagaaactaatatttcttccgcttttgttcggggagctttatactctgctctgtcctgcagctcgaaatccggagccggcagcccttttttgtttatttttccgttagaagttaaaggcatttcatcaagctcgataaaataagccggaaccatataacttgcaagggtatgagacaattgtttccggagccgggcagccgttgtttgcccgccgcttacgtaatatgcacacaattgtttaaacccgtggacatcctctctggctgtaacgacagcttccttgatcgcttcttcttgaagcagtgccgcctcgatctcgcctaattcgatacgataacctctgattttcacttgttcatctattctgcccgcatattcaatgtttccgtccgccagccacttcgccaaatctccggtcttatacatcttcgctccgggttcaaacgggtcatcgacaaatttctctgccgttaattcgggacggttcaaatatcctcttgccacaccggcgccgctgatatagatttctcccggcactccgatcggcgcgggtttcatattctcatcaagaacgtaaatgctcgtgtttgccgcagcggttccgatcggtaccgattcccgtctgtcctttacggcatcataacggtaaatcatgcagccgacaacggtttccgtcggtccgtactcattgcatatttcaacccggccttcgaactgttcatgaatgctgcgggctaaccgggtgcttaagttttccccgcccacaatcattcttcggacagccgtttgatcggcaatgttcatttctttcaaaacctgcaaatgggccggagtcaatttaatgatatccaccctcgggtctcgcacaatcgattcaagcagagctgttttatcttctccgtcatagacgatgattgcatttcctgtgacaagcggcgtgaaaatagaagtcaccgtcagatcaaaagaaattgacgaatacaatgggaagttggctttctcgccttttacataaacctctttcgcccaccaaatataattggtcaagccttggtgctcgattagtacgcctttcggccggcctgtggaacctgacgtataaatgacatatgccaaatggctcacatcatttatctgagcaaggtcagagccatcttggtgataagaactttcatcatcaagtaaaaccgtgacgccttcataggcaagctgtttcctgacgtcccgctgcattaaaacgattccggcttgggagtcatccagcatataccgtatgcggtcttgcggatattccggatctatagggacataggctccccctgattttaaaacggcaaggattccgaccaccgattcgatgctgtttctcgtgatgatggctacaggctgatccgtctggactcctttcgctcttaacgttcgcgcgagtcggttggcccgcttattgagctctccgtacgtgagctgcctgtccttatcaatgacggctgcttgatcgggcgtacgctgcgattgctcttcaaataattgatgaaccggcgtctgcggaaacggcgcggccgtgtcgttaagcgtctgcagaagggttcttctttcgccttccgttaacaattccgcttgatccacccggatatccgcatttgtcacgacttgttgcaggatttgcatgaaatgttcccgaacccgctctatgcttgcccgatcatacacatttgcattgtattcaaaagagatggtcatctcgtcgcccggtataacggtcaaattaaaatcgtagttggtctgttcttccatttgcacgttggagatcgtgatggatgttccgttctggcggcctatactttccatatactgatcaaccggataattttcgaatatcattaaatgtgtaattaaatcttgtttttgcgttgtgcgcgcttgaatatcgtacagcgggtgcgtctcaaattgttgagacgctacagccctttcttgcgcctctttcataagctcggcaaacgttgttccggcttcacaccggaaccggacgggaatggtgttaatgaataagccgatcatggtttccacgtttggaattccagcaggtcttccggatacaacacttccaaacacaacgtcccggctgcggttatatttctgcagcaaaaccgcccatgccgtctgcagcagcgtgttcagcgtgacatgatgctggcctgccgtccgcttcattttcgaagtgagatcggagcttatgtcacacgtcactttttcaggaacgtatcgtccgtcttccgctgcatggtgatccttaggaaggccggtttgctcctcatatccctccaagtattgatcccaataagccgtggcctttttcgcatcttgccggccgagccattcaatatattgactgtacggagtaattgatgattgttcaggctgcttttgctgaagcaaggcaaagtaattctcgaatatttcttttgtaatcagcggcaggcaccagccgtccatcaaaatatggtggaagctccagataaaacggtatgtcttttcatccgtacgaaggatgaatagccgcattaacgcgcctttttctaagtcgaacccccgcatcttatcttctctggcatactgctgaatcatcgcttctttttgtgattccttcatctctcgtatgtcattgaattgaaaaccgatttttttcgttttgaatataatttggagcggctgatccttccagcctctgtaaaaattcgtgcggaaaatatcatatttttgcgataagccgtccaagctttttgaaaatgaatcaatctccagatctccatgcagatcaaacatcgtttgctgaaaataagcacctgaattcggatcaaataagctgtgaaacagcatgcccttctgcatcggcgttaatggataaatattttccgcttcgcctaattcacgcgtctgctccaaaagctgttccagttcgtcgattgagatatcttttaacaggatgtcacttggtgtgagagaagtctgctgccggcttacgcaatgcgcaatgacttcttgcagactttctttcaacccttgggcaaattgcgccatagtagatctttcgtattgtttgctgctgtagctcagtgtcagtgataatgtcccttcggcaatcatgccgttcaaatcaagcacggccgttctctcttggttttcgttcatcgataaccctgtggaatatggcgatatgcgcaaagcctgatgcttcaggtcttggtcaaattgtcccaaatagttaaacgatatctccggattcagctgcatgctgtcggcttccggatgcccggatatatatttgatgatgctgtaattcattcctttatcagggatgcggcgcagcccttcttttacgatcttgatccgctgcgacaggtcttttccggcttccatcctcaggacgacagggtactggcttgtgaaccatcctatcgtgcgggaaatgtcagcatccggaataatcggttctctcccgtggccttccaaattcacgacaatgtcttccgtgcctgtccacttgtgaacagccagccctaacgaagtcagcagcagatcgttgatatccgtgttgtaggcgcggttcgcttgttttaataattgctccgtttcctcttttgtccattgaatcgtcacttcttcgctgtcacttaataacgatccttcgctgatagtgtccttaggcaatggctgaggctttatgcttgaaagctcagtccaataagcaatctcctctttcatgtcggtttccgccgcatatttggacaattgatcggcccagaatggaaacgaatctgttttttgcgggagctggatcgtttgtccgcgttctgcctgctcataaccgcttgcaaaatcttcgagcaaaatacgccaggatactccgtcaatcagcaaatgatgaattgcaatcagcaaatgatctccgtccggacattggaacaaaccgagcttcatcaatggccctttgtctaataccatgctgctttgaatctcattcgctttatcggcaatcgcttgagccggatcggtttcccctttataattcatcacttccagatggtatagttcactttcatctgttcctgtaattcgcggagcgtatccatccggcgttttttcaaaaatcatcctcaaggcatcgtgatgcgacgcgatctgttccatcgtccggcgaagcggagcctctttaaagctttccgccgaatataacatgacggcctgattgtaatggtgtgcatgcggcatgttttgttcaaaaaaccaatgctgaatcggggtcagcttggttccgccattcacttctccttgatcagccaccctgctgaccggcgctacaaactgactaagttcagcaatcgaggggtgtttaaacaaatgcttcatatcaaccttgtatccggcttgatacaatctggatgacacctgaattgacttaatcgaatctccgccaaaatcaaagaaattatccagaattcctatacgttctgcccctaatacttcttgccagatagacgccagcagttcttctattgtgttccgcggggctatgtattcgtattccgcccgcgtattttcgtcagcagcaggcaaagctttcagatcaatcttcccattggaagtgagcggaatgcgttccaatgggataaagcgggagggaatcatataattcggcagttcccgggataattcttttctgaactgcgcagcggtcaaagaaggcccgccgacataataggcatacaattgtttggccccgtctgcgtcttcccgcgcgacgactgcggcttcacgaacgttttccagattgaacatggctgcctctacctcgccgatctcaatccggtagccgcgaattttcacttgatgatcaatccgccctaaatattcgattcttccatccggcagccatctggcgagatcacccgttttatacatcttttgaccagggacatgcagatgctccacaaatttttcctccgtcaattcaggacgattgaggtagccgcgggccactcccgctcctccgacatacagctctcccggtacgccgatcggctggatttgatggtgcgctcctaaaatataagcttgatggttggccaccgggctgccgattgtgatctgttcatcagcggactgaacagggtgaaatgtagataccacgctgttttctgtcggtccgtattcattattgatccgaatgcgaggctgcagagaatgcagcttctcaactgtatctgtttccagctgctcaccgcctacaacaacatgctgaacatggatgaagtcctctgtgttcatctgttcgatcatcgttttcagaagacggggagaagttgagaaatgagtaattctctcttgttttatggcattttgaatggcgaaagtttctttattctcttcattaggcaataggtgcaaagttgcccccgagatgagcgggccgaagaaatttaaaatgaacgcatcaaaaacatacgggtacaagacaagcacgcgatccgccggagaatgcttaaaaaacgccttcttccattggagcgaattcacaatgccgccgtgttcaaccatgactcctttcggctttcctgttgtacccgacgtataaatgacataggctaaatggctgtgtcccgttgctggtgataacaatgagctatcggcatggtatgatgtttcatcattcaaatcaatcaccgggccgtcaaaggtgagactgttttttaaatgacgctgaacaaggagaacgtctgcatccgcatcatgaagcaaatattgaagccgctcttttggatattcaggatccaggggcacataagcgccccctgccttccaaacggctataatggatacgatcatctctaatgaacgatcagcgagaatggcgactaacgtatcgggttgaaccccgcaattacgcaatgttcttgccaaacggttcgccttctcattcagttccctgtacgtcaaatggtcgtttttaaacttgacggccgcatgctcaggcgttctttctgcttgctcttcaaataattgatagactgttctgctcccggagaaatctctgacggtgtcgttaaaatcaaacaatagcttctgtttttccgcttccggtaagatctctgccgtatggatcgcggcttgaggctgaaacagaatcacagacagcagctgatccaaatgggacacaatttgattgatatagcgctcatcgtacagattgccgttataaaaaagcttcaaatgaatcccgttgttctccaaatcaaagtgaaacagcgtatcggctgcagtatcttctttaaattgcaaggaatgaatttcgttaagcgaaacgacggtatgaatcaacggcagatgctcgtcattgtattgcacgctcagatgctgaaccatttttctaaacggcaggttttgatttttcagagaatcattaacggcttctttcagctgcccgaatacggttttaaatgtactctcgtttgaaagcgtattttttaagaggacaatgttgttaacggctgactggccggctttttgcttcgataccgtcggaatgccaagaatcaggctcgtttgatccgtatatttatataacaagcattcaatacccgccaataaaatcagataggccgccatatcggaatgattcgccattgtcatgattctttgagatacttccggagataaggaacggcagatgcatttttcctggtagccggtacgggcaaacgacgctttatccgctgctttaaagtaagggaatgcgcttaatccgtcttcttcatcaaacaggttttcccagtacgtttcttggtttttaaataccgacattggagcacctcattttatataatttaaagaaataatgcttttccctaaaagttcaattgaatagaatcaagcgcgttctcttcttcctcattgctgccgctcaatccgatatgttcaattagaatgcttggctgttccaaaatcgccgatagaatgtgtaagtagtcgtttgataaaacctcgattctgcttttcttaaacagttttttcgaatattcaaacagtccgtgatagttgtcttggtccgcctgaatcgacaaggtcaaatcgaatttggcaaccggatgatgaaatgaatacggcttgagttgaagagaatcgaaagtcaattcagcatgatcgagattttgcagcacaaacatcgtatcgaataaaggattgcggcttgaatcttttggaagatgcagatgctgaattaattcttccaatggatagtcttgatttttataggcgttcagcatgttttcttttacttcgtttaagtaggcatcaaatgttttacggcccgccgggtgattgcgaatgactaacgtattgacgaacattcccacgaccggctctacatccaaatgagtccgcccggcagatggcgttcctacgataatatcttcttgtccgctgtacttggataaaagaatcgtataggccgccaataaaatcatatacagtgttgctcctgtgtcttcttccatttggcttaaacgctgtttcaagtgttcgggtataagaaattcaaatgattcgccttcgtaatcgcgtatggcaggtctctcataatccgcaggcatatccagtacaggaatatcactgtgaaactgatccagccaatacgcttcctggctcttgatgttccgtttctgaatgtccgattgctgccaaactgcaaagtctttatattgaatagagagcgggtccggttcgttcccctcgtagattcggcttaaatctttcatcagaatattgacggacacgccgtcagaaatgatatgatgcatatcaaccacaagcacgtgccgtgcaggttcaatttcaatcagtccggcccgcatcagcggcggtttggctaagtcaaacgctttgatgaaatcaagcacacggtcttccgctacttcttcgcttgcttgaatccgttctatcgtaaagtcgacgttctgatgaatacgctgtgccggctcgccttcatataaatcaaagctggtccgcaacgcttcatgacgcgcgattaattttcggaaagcggcgtttaaccgttcgggatcgatcgtcccttccacattcatggcacccgtcatattgtaagtcagctcgccgccttctgtgtgacttaacaaatacatacgcctctgagctgaagaaaccggataatatggcatttcctttgcagccggaatcggtacatatcggtttttgtccatgtgtaacgccttgtcagccaattgttcaatggtaggaaacttgaatatgtcttttagagacagattcacatccagctctttgtgaattctggcggctaaggcagccgctcggatggagttgcctccgagatcaaagaaattatgtttgatccccgcatggcttattccgagcacttccttccataaatctgtcagtttggactccgtctcattacccggcggaacatattcagctgtcagctgcagactcgcttctggtgctggcagtgccttacggtttattttcccgttggacgttaacggcatatgctccagttggacaaaataggacggaatcatgtagtccggaagctccgatgacaattgttccctaagctgcgcagccgctataggcttgtcgcttacgtaatacgcgcataattgttttaagccgtcttcttcttctttcactgtaaccgcggctttttgcaccgcttccgcgttatgcattgctgcttcaatttcaccaagctcgattcggtgtcccctgattttgacttgttcatcaatgcgcccgatatatacaagatttccgtccttcaaccgcttagccaaatcccctgatttgtacatcttcgctcccgggacatacgggttttcaacaaatttctctgccgttaaatccggacggttccaataccctctggcaacacccggtccgctgatatatatttcgccgattaccccgatcggaaccagatttctgcttgcatcggccacataaatatccgtattggcagccggagtgccgatcggtacaaattcccgcttgtcccgttctgcgtcgaagtgataaatcatacatccgacgacagcttccgtcggtccgtattcattaaaaatgtccagccggcctttaaactgctcgctgacacttttggccagacgggtgcttaaattttctccgccgacaatcattttccgtattgcggtgccgccaccgatattcatcttcttgatgacgtgcagatgtgccggggtcaatttgatcatgtctattcttgagtcccgcataatctcagaaagcacagcgcttttgtcttcgccgtcaaagacaatgatggtatttcccgtaaccagcggtgtaaatatcgaggtcacagtcagatcgaaagagatggaagagtataatgggaagttggttttctcacctcttacataaacctctttcgcccaccaaatataatcagccagtccctgatgctcaatgaggacaccttttggatttcccgtggaacctgacgtatagatcatgtaggccaaatcatgcgcatcgctgtccgattcaagattcgagtgatcctcatggtatgagttttcctcatccaaaagcacaacgtcaccatcatacggtaattgatccagcaggctgcgctgtgtcaacacaacctccgcccttgaatctctcagcatatattggatccgatcttccggatattcaggatcaatgggcacgtatgcgccgccggctttcagaacagccaaaattccgacaatcagttcgatccgatgcgggcagatgatggcaacgaattgatccgcttgtacgccttttgtccgtaacgtccgcgccaatcggttcgcccgttcattgagctgtctgtacgtataccgctcattgccaaaaataacggcttcctgatcgggactctgttccgcctgcatttcaaaccatcgggttactgtttcgttatgcggatacggcgtctttgtgccgttacactccgtcagcagttgatgccgttcggtttcagacagcataggaacggaagacaatgtcatctccggctgctcaacaagactgtttaagatgccggtatagtgtctggtgatctgttcaatggtgtcttttgtgaatcgtcccggtttataatcaaaatgcatctctatctgttgaccggcatcttcgatcgtgagcatcaaatcatacaaagagacccctggatttcgttctttcactttaaatgtacattcattgtgccggatttcatgaaattcaatgttttgaaacacaaacatcgtgttaaacagagactttccggttgtttcccgctgcacatttaatttctccacaagccggtcaaatggatagtcttggttttcgaaagcgtcaagcgtctgccgctttacttcttccagataatccgtgaacgttctattggcgtgcggcttcgtccggattccgatggtttgtatgaaaataccgatgatcttttcgatatccggatgatttcttcctgaagcaggcgtgcctacgacaatgtcttcttgtccggtatatttatgaagcagcacattataggcggccaggagcactgtatagagagtggtttccgccttttgcgccaaatcttgaagcgaacggatgacatccggctgtaaggagcatgtcactcgctgtccctcagaagaccgttctgccgcttttgaaccgtctgtcggcaggttaaggatgggaatttcgtcttgaaattgttccagccaatatgtctcctgccgcttcatggcatcctcattcagccgttggttttgccattctgcgaaatctttatattcaaattcaatgtccggtaatggtttctgatgatataaagccagcaattcatttgtaaggatgttgacggaataaccatccgaaatgatatgatgcatatcgatgagcagttcggcctgctcgttttcaatcttgatcagctccgcacgaactaacggagcttggtccaggcggaacggttttacaaaccggtctgaataggcatcaaattcgtcccggctcattgtccggacatgaacgttaaaatcaacttcgttttcaagtttctgaacgatatcgccatctataatgtcgaaatacgtgcgaaacgcttcgtgccgctgcatcacttgttgaagagatgagatcagggcttgctcatcgtacttccctgttattgatatttggccgaacatattttgcgccagctgatccggttccagttggtgcaggaaatatactctttgctgcgccggcgatgtcgggtaatacgcttttttctcggcagccttcatcgggaggtgcacgacttttgtttcgttctgaatgaaatgtgctaattccttaacagtctggtgattgaaaaattgtccgatggaaaccttttgatgaaatgtcttctgaactttggaaagcataagcgtcgcctggagcgagtttcctcccagagccaggaagcgatctgatctgccgacccgttcaaggccgaaaagttcctcccaaatccgcgccagctgccgctccgtttcatttatcggcgcctcgtaggcttcagtgaaatttgctgtattgcttcctattgaagagacccgcttctggtgttcggcataaagtgcttgtaaatcatgctgttcttcatcggaaaacagcatcatggcgtcaagagggattgaatctccctcaaccattttttgcagcaattttgtaaaacccgctccccactttttcatgatttccggactgatgacgttcgtattaaagtcgaaatcaagaatatattcttgatgcgcgtctgttatgttaagaaataaatcgtacagggtgcattttaccgggtatgcaacgggctccgcttccgcctttccgaaatgcagctttcgaaaaggcctgtctaaattaaagataatacgcatatccggcacttgatcgtgcggaagctctctggccaccagtgttatcgggacggcttggtgccgcattgcaagattcacgctttctttcatactgccaagataaccggttaaagtgctttctgaagtagacgtgttcttcaccggaatcatattgacgcaatttccaatcagatcatgctgttttatatgcgattgacctgctgcggggatcccgatcacaaggcctgactgtttggtaagccggtgcagaaaaagatgaaatgcacccagcattgtcacaaatacgctatttttcatctgaatgcttaatgaccttaaagcctcgctcaatggccgtccaagcctgacggtacaccggtctccctcatacccgttcggataacggacagaacctgtgctcggcagaattggctgctgaatcggttcagagaaatgacgccgccaataacggaccccttcttcataatggccgctgtcaatctgtgcctgctgccagtctaagtattggcgaaacgaaacatctgcctctttcggtgaaatcggttttccttgtacgattgccgcgtagttgctctccagttcttgaacaaatacggcgattgaccatccatcgacaatgatatgatggaacgtgagcacaatcagatgttcattgtgagccgatgtaagcacatggattctaaacaaaggcttttgttcatggaaatggaacggccgcttggcatcttctgtcagccatttttgaatttccgactgccgatgttcatgcgggtgaacagtaaaatcaatgactggtatttctatattcatccgtttctgcacttgctgtacctcgtcatcgggatgaatcactgtacgtaaagcttcatgacggccaacgatatgccggacggcttgttttaatggtgtatgctgcagttcgccctccactttcagcataatggactggtttaaagcggcggacgcttcattcccgtaatgggatgccataaccaattgtttttgttcatctgaaagctcgtacgcccctgatttgttatgtccgccgtcatcaggggaatccgggccttccggaataaatccgcctcggcgaagatccttcaccgtgtctttaacagcttgaatgatgtgttcaatatcatccgcggtatgcgccgtggataggaagcagttgcgtccttcccacacatagatccctttataattgagatggtaaaagaacaagtcgttatcaagcgatgagacaaaccggaataaagaaccgaattgaaccatgcggataggcacttgcgattgttcaaagaagcgattcagccgatcaaccagggaggctgttttttgattcagctgttcatacaggtgttctccctcggtttgtaaatggcgaagcacggctaacgacattctcatggtaagcgggtgagtattgaaggtgccggccacaaacgtgcgtttcgcctcatcttgcggataggaatcgtccccatactgccaggtacccccgtcgatcgcattcatgaactcagcttttccggcaactacccctaacggctgtccgccgccgatgatttttccgtaggtcactaaatcagcctgaatgccgaaccattcctgtgcgccgccgagaccgatccgaaatccggtaataatttcatccataatcagagctgttccggattgctgcgtgatcgcccgcaattctttcaaaaatgcccgcggctgcaaatccggtctgcggctttgtaccggttccaccagtacggctgccaattcatcaccaagactgcggatcacgtccagcgaatcgggattgttataatgtaaaataatcaaatcatccataaagctttgcagtatacccggagccagcggattcgcagacgcggctccgccttttgtgccggcaacccctaatacgccgtcaaacgtgccgtgataagatcccgagaacgccacgactttctttcttcctgttgctgcccgcgccaaacgcagggcaaccatgacggcctctgttccggaattatagaaagcgaccctttccactccggtacatgtgcggatccggtcggcaacttcaccggcgacatctgacatcgggccgagcggaggcaatgatgaacgggctgaatcatcgataacctgtgtaataaaggaaggatgatgcccgaaaaggttaaccccgaatcccatggtgacatcgatatattcatttccgtcaatatcccacattttagaaccgtcagaacgttcggcgataatcgggtatacgatttccttccaatacgaacggaagctggacaagttgcggttgtttgcatgagcaaatcgggtgttgtccgtatattgtttggaacctttcgttttatctgcgtatttcttgatgaaatcttctaagtattgtttttgccgtgcggtatagtgtccctgttcatgcaggttctgaggctggaaaggaacatagggtttcgcttcttgagccgctttcttttctgcagtgacggccggaggcccctgcttgacagaaggaattgatttctcttgcgctttagcgtattctttctcatcggaatgatgtccgctgtttctcaacaaattaaagctatttaattgagcttgcaaggtatcctgaattaattgattctgagaagcgattattttttcaagcatatgctcttgttgaccttctctgcgatccgattcagactgtgcttctgaaatgacctgtatttcctgcgccggaacattctcttgaggcggagcggatgcaaaggacgatggaacggtctcagccaagtaatctatgacactttgaaggttgttcatcgtatcaaaaaaacgatccattgggatgtctgccccaaattcgtccgcgatggcttttttgacctgtgacagcatgatagaatccattccgagcccgataaaatgagcattcagatcgagttcctccgctctgatccccgaagcattgctgattacagttttcaggaaggattcaatgtgcgacttcgattgattgatattcaatgccgcttctcctctcttttcgtcctcgtttaagcgcaattggtcagcttcagcccagcatcggctccgttcaaacggatacacgggcaatggcgtcttttgtacagtttcacctgaataaagcgcgcgccaatcgataacggctccttgcacaaataattcggcggcgcgatgcagccatgtgatccgttcatcttgcgtacgtaaacgctgcttaatcagtgcggctgcttgtttattcagctcttctttatgagcgggcagcatttccttcatattcttgtagccgatgtatacaccgggaaggtttctgtctccctgaatcaggcgggtcagcttatccgatagttcttgtttaccggatacaatcatggcaatgccatgatccaaatgagtcctgcccgtactggctgtatagcaaatggactttaatgaagcttggctgtcatccgatacatattgccggtactgctgtgcgagttcatagagtgatttttcagtatgagcggataaaacaaataggtgcggcccatgttcatcctcgggcgcatactcactttgagaaatatattcttccaataccacatgagcgttcgttccgctaaagccaaatgagctgactccgcctcgcagcggctcatcaccggatgggaacgctgcagcttcctggtttacgtaaaatggtgaagagtgaaaatgaatgagcggattaggttcattaaagtgcactaacggcggatttttcttgtgattcagcatgaggacagatttgatcagcccgacgatgcctgccgcttcaaacaaatgaccgatgttcgatttaacagaaccaatcgcacaaaattgtttttttgccgtatacttttcaaacgctttacaaagcccgttaaattcaaccggatcgccgagcttcgttccggtgccatgcgcttcgatgaaagacagtgtttcaggggcaatgcccgcgtctttccaggccgtctcaatgacctcagtctgagctgccggattcggtgctgtaatcccggcggttgttccgtcttgattcaacgcgcttcccttgattacgccgtaaatatggtctccgtcgcgaacagcatcctgcagaggtttcagcaggactgcggccgcgccttcacctgtgccagtaccgtctgaatctttgctgaacgttttcgtgtacccgtccgaagattccatatcaagtccgatacagatcggcaagagcgatgtccggataccgccggcaagagccatttcacaatcgccggatattaaagatttacatgccatatgaacggcggcaagcgatgaggagcacgccgtatcgactgtcaccgccggcccttttaaatttaagaaataagcgattcggctggctaacacggaagggagattgcccacgatatattgatgaagctcctccggataattcgcagaaaggagacgttcataatcgtagcccaccttcgagtaccctgcatataccccgacacggctcccgttcatgctgccgccggcatagcccgcatcttcaatcgcatgccatgcagactgcaaaaacagtctttggttagggtccataaactgagccgttttaggagctaaaccgaagaacgagtaatcaaagcggtcgatttcatctaaatagccgcccttcacaaactgattctcattgatttcgctttggatggactttaaataatccgccgcatctttcagccgggatgcagggtattctcgaatgctgtgctcacctttttcaagcagattccaaaaatcatttttagttgatgctccagggacattgagcgacatcccgataatggcgatatctttcggcgtcacgtggcttggtttcgctgccacgtcctgcttgatttcagcccggctttcagacagatatgccgctaaatcagtgatagaaggatacgtaaagagatctgaaacggcaagctcgcgtccgaatttctgttctatgcgctcggcaatctgcgataactgtaatgaatttgctcccatatcaaaataactgtcagcgaggtgaacctttttcccattgagcacatcggaaaagatagacagtaattccgtttcaatttcatgaatgggagtctgtccggacgtttccgggctgctctccaaatattcattgatggcggcagactctgttgaaaaattccctgcctcatactgtctggcaagttcgtagcgtttaacctttccgctggttgttttagggagttttcggatcggaaggacatcttttatgctccagccgccccgcttgagcaaatgcttttttatctctttgacaagcggtgcgaatttttcaggtgattttttgtaaacaacaaagagcacgatttctccgctttgtgtcttttgatcatatacaccgcaggcggcaacccttcctaagtcaacctcttccatttcaatcgcgacccgttcaatatcgtgcgggtagatattttttccgttcacgaaaataatgtccttttctcttcccgttacgactaagttaccactttcactaatgaatccgaggtctcccgtttttacccagccgtcagaagtcagcgctttttccgtactctcggggttgttataatacccttgagtcacattgtctcctttgatctggatatggccgatgattccgtcttctactctttcatttgcttcatcggagatccgaagctgacaatagtcaataggtcgtcccacttcgacgaatgaagcgcaattttgatcctctttgctgacgtttacagctctttcaccaagatttaaatagtcacgatgcaaataaacgggaacgaattctttacctaatttagagaatgctgcgccgaccgaagcttccgctaaaccgtaaacattcaaaatggcggatcttttcagattgaatgctgcgcatcttttcaaaaattcgtcacagagctccggcaatatcggttctgcaccgtttgcgatgaccttgatgtgggataaatcccagtctggttcgtttttcagaaatttaaggaagtagttgtacccgaaattaggagaggatagaatactggctttatgttcatgagcttttttcatccaaagaataggtctgcgaataaataattctgtaggcattagattttgattgattccggttatgaagggaacaaggtggcaggcgatgagccccatatcatgcgttaaaggcatccatgataagaaagagtctttcgaatgaacggctagggcattcccaatggcgcacgtgttatgtattaagttgtgatgcgttaacatgactccttttggatctcctgtcgatcctgaagaaaattggataaaggcgagttcatccgcatcaggttcataaaacgaagcggggtaatcgtaggtttgatcttgaatgatgtcagatttttcgtttaattgatgatggaaatcctgtaaatcgtgttctgcagcgtatttctttattttgtccaatactttttcagaggcaatcagaaacggatgatttaatatattccaaatgcgccagaccttcagcttatggtcatcatcttctccgatactgaccggcaccgggatcattcctcctaatatacaagcccaaaaagcaacgacaaatgatttgttttcttggatttgaaatacaatttcctgcttcggcttaatgccgagatgctgtaaatagccaagatacccttgcgcctcttcaaacaattggcgataagagacaaccgtctcgtttttatcggattcgataaaacggatcccgcgatcagagatattgcttctttcccgaatgacttctactaaggtttggaattgactggtatacataggtcccctcctgggcgctttattttaaaatccgcaattcttcccaagccggaagctgtttagcttcacaaattaatttgcataaatggatcgaatggttgagctcttgttctgagagctcattttcatgtctttccattctctctttcagctcttggatttgcgtaaataatgccgtcgtcatattggaataagccgctgaatccttgttgtaatttcgcgcaatgacggattgaatcatcaatttattcagttgttttttgcgtaaacggacaatatgtttctttctttccgctgaattggaaagcaagtgaacatcagatgtctgtcctaagggataaggtacaatgtgattcgttgtttttctcagcagaccggctaaaacattgttcggacccatttcgatgacttctgtgactccgtgtaaaagcaagtaatgcatcgattccgtccatcttaccggcatcgtcatgtgctgcttgagatgttcgctgatcgaatttccgctgctgtaagggcgtgcggtgacatttgaaatgatcggccatgcggcatcccggaaggaataccggtgtaatacagtctggaattgttcagatgctgatcgtatcagcgaactgtgaaaaggcgcactgacattcaaataagtgtatgccgctcccttttcctccgccatcttgatgacacgttccacagcttgccggtgtccggaaatcacatgctgctgttctgaattcatgcaggctactcctgccggaaagtcttccgtcgacactttcgaacatatttcctgcaacgtttgaagagagaggtgagtcacggcggccatcgtcccctgctgctgaggatccgcattttgcataagaattccccgctgccttacaagtgtaacggcatcctgaaaagaaagggcgccggcacagacaagcgctgaatattcgcctaagctatgacctgccaggaagcggggcttcacccctatttcctgcatatacacttgaaaagcaataacactgaccgttaaaatagcgggctgcgcgttcattgtctttgtcaattcattcatatctccgttaaaacacagtttttttacatccaaggagatcgcatcgctcgcttcttcaaacaatctctttgcgagcacaaaatcattccaaaattgtttgcccattcctacaaattgagacccttgtccaggaaataaaaaggcaagattgttcatgagattcctccgatcatattgaacagaaatacaatatcctacaaattatccctttatctaacatcctagcatgattataacaaatgtgtatagaatactttcggaggagttattgttcgattttacaaacgaattagatatatttattcataaaataaaacatggggtttcaccgaaaatcagtcttaaagagagatgatgaaaagccggagtggagcctgttaccggctcttcatcacttaggtcgcgctcttcatgtttcatatgttttagggctattggcattattgtgtcagaaattacatattttatgtttattgtaaaaattcatttgtatatctgtgaaggattgtaaactgatggcgcttgattataaatgcggcgcagaaatggatctggatgagaaaaatctgcaaggacaaaatacgccgcagaacatgtgaatgacccagcccggataccggttgggcagtaaatcggcctattgagtgaacaagtttttcaggcataaaaaaacagccgttcagagcggctgtttttaaaaaaatataagaactattgagcggtatacccgccatccatgactacggcctgacctgtaaccccttttgctttgtcgctggccaaaaatacagcgtaatcagcgatttccttcactgacagcagccgtttttggggaacgagcggaaagatgacgtcctcaagcacccgctcgtacggtacattccttgttgcggaaatgtcctttaactgattgcggacaagctgagtgtccacatatcccggacaaagcgcattgacggtaatgccgtcagccgcgccttcaagtgcaccgactttcgttaaaccgatgacgccgtgcttggcgctgttatatgccgctttcccgtgaaaaccgatcagcccgttgacagacgccatattaatgattcgaccgaattgctgttttttcataatggggaatgcatgcttcattgcgataaatggcgcagtcagcatgacacgaatgagccgttcaaactgttcggtgggaaattcctcgatgggcgcgacatgctgaatgcccgcattattcacaaggatatcgagacgtccgaattgtttctcgaccgtctgcagcatgtcggccacttgcttttcatttgttacatcgcatgtgatgctgactgcttcacagccttcatctttaagtcctgccgccgcttctttccccgcttgttcgtttacatcagagatgatgacggctgctccttcacgggcgaattctcttgcaatttcaagcccgattcctccggctgctcctgttacaacggctgttttttcaataagcaatgaatccatggcggcacctcctcattttggtctgaccccgttttttaacgactggctgacagtaaaatgaccttctgttttctcaaagacctcctccattgttacaccttcctgcagttcggtgagcgtcatacggccatcatgaaaatcgaatacagccaaatctgtgatcagccgatcgaccacctgcctgccggttaaaggcagcgtacattccgttctcactttagattccccatatttattaacatgctccataatgacaataatccgttttgctccgtgcaccaggtccatggcgccgcccattcctttgatcatttttccggggatcatccagttcgccaaatctccccgttcggacacttccatcccgccgagaatcgctacatcaatgtggccgccgcgaatcatggcaaaggattcggcactgtcaaaatacgaggctccctttacctcggtaatggtttcttttcccgcattgatcagatcggggtcctccgttccttccgccggataaggcccgatcccgagcaagccgttttcagactgaagcaggacgttataatcattcggtatctcattggctacaagcgtcggcatccctatccccaagttcacattcattccgtcctttatttcctttacagcccgtttgatcattcgttttctgctatctctcattctgtcagcctcctttatcatgcttgccggacggtgcggcgttcaatccgtttttcatgaatcccgccaagcagcacatgctgcacaaaaatacccggcgtatgaatttgatccggatcaagctctccggcatcgacgatttcttcagcctctgcaatcgtcactttgcctgccattgcagcgagcggattgaaatttctcgccgtctttctgaacatcaggttgcccagaggatcggctttccaggcctttatgatggcggcgttccctgtaatccctttctccagaagataggtgcgcccgtcaaatgtcttatgttcttttccctcggctactgatgttccgacgcccgcaggtgtataaaacgccggaatgcccgcccctcccgcgcgaattctttctgcgagcgttccttggggcaccaattcgacttccagctccccgcttaaaaactgccgttcaaaggttttgttttctccgacataggatgcgaccatttttttgatctgccggtttgcaagcaagaggcctaacccccaatcatcaacaccgcagttattactgacaacggtcaagtttttcacgccgctgtccctgatcgcgagaattaattgttccggaatgccgcacaggccgaagcctcctgcgatgagggtgtctccatccttgatcagtgcagcagcatctttataagagtccatcacttttccttttcccatattcgtttcccctttctgttttggctacacaaggcccgtcagactgtaaatggcgatgatgacaaacacagctgctgttttaatgacggtaatggcaaagatatccctgtaggattggcggtgggtcaacccggtgaccgcgagcagcgtaatgacggcgccattatgcggaagagtgtccattccgccggaggccatcgaaatcacccggtgcatgacctccggcggaatgtggaatgtattgattgcttctgtatatgctgctgacatcgtgcttaaagcgatgcccattcctcctgatgccgatcctgtaatcccggcaagcgcagtggtcgtcaccgctccgttgacgagcggatcagtaaacgtctgcgatatgccgctgctgaccattttaaagccgggaagcgccgcaatgatgccgccaaatccgtattcggctcctgtattcatcgacgccagcaaggcaccccgatgccctcattcagtccttctttcaaattgaagagcacttttttccaatcgaacaaaatcgttgtcatgattccgatgagcagtgcgagttctactgaccagatcgcagtgacggaggaaaggtcaatcttcccgaacgcttttaaaccgagctgcgcaaaatcaaatccgtcagggtaccaatgcgggagccacatcgtgaagcatttgttcatgatccccacaaggataagcggaacaaaggcgagcacttgccgcgcggggctgggttctgcctcctgcggtaaaacaggcgtatgtttttcattagccagacttgaggaatcctctgcagcggaaacttcagattgaaatccagcatagccttctccggcattggccgcttttttgcgccgggattctaaataaatcattccggccgtaagcacaaatgctgcgccaatcagtccgagccagggagcggcataaatgtttgttttaaaaaaagctgtcggaatgacattttgaatttgcggtgtgccgggaagcgcatccattgtaaaagtaaacgcgcccaatgcaatcgtaccgggtatcagacgcttgggaatatcagctttaataaataggtttttagcaaacggataaatggcaaacaccgctacgaagagactgacgccgctgtacgttaaaatcgcacccattaagacgatggcgagaatggctctttttgctcccacaagcctgacgattgtttttgcaatcgactcggcgagcccggatatttcaacaaccttgccaaaaacggcccctaaaagaaatacgggaaaatacagcttaataaatcctaccatcttctccataaatatattcgagaagaaaggaagtacgaagcttggatctgtcaggagcacggcaaacagcgcacaaatcggggcgaataaaatgactgaaaagccccggtaagccgcaaacatcagcatgcctaatgccaataaaataataacaatgtccacaaatccccctcttttctgctcaatattagtaagcgcttacaaagatcaagaaaataaagcagaaaacatgccgattttgcaccgtttctgaggctgaaaaaatgtgcatcatggtgaattttccgttttggcgaaagaaaaggagattcttgctgtatgatattgaatggctgagcagcgagtttttttagggatagtgagatggatcagagaggatttttgctttataaatatgtattcttttttctttcatttatttcctgcaagaggaaccgataaaatccggccctcctgcatggtcattcagccaaggacaaccggaagctctttgagcgacctaaaaccaatgagcttgcggtattcaaggcggtgtgcggccagccgaagcttaggcatccgctcaaacagtgtgagaattgcaatttgtgcttcgatgcgcgctaatgaggagcctatgcaaaaatgggcgttctttccgaatgcaagatgcggattcggttttctttggatgtccattttatgaggctgatcgaatatgcttggatcgcgattggctgcccctaaaaggatatatacctgctctcctttttttatggtcttcccatttatttcacagtcttctgaagcggtgcgtgccgtcagctgcgcggggctgtcgtagcgcagacattcctcgacagcagtttcaataagcgaggggttttctctcagtgcgctaagctgttcagggtgtttcaataaagtaaacacaccgttgctcatgaggtttaccgtcgtctcgtgtccggctatgacaagtaagatacatgtcgcgagcacttcgtcttttgaaagctgttcccccataataaacctgctgattaagtcttcctgaggatgtgctttccgctcgtgaatcaaatctctgaaatatgcagtcagcctgcctgcggtgtcgcttgctctgactaacatctttcttgaccgggtaagatcaatggcctgaatgacgtctgccgtccattgtctgaattgatatctctcctctttcggcactccgagtatctccgcaatgatgaggcttgccaatggaaaggcaaactctgaaacaaggtctgcgttttttttgttttggatttgatccaacaagtcatgaaccgtttcttttatacaggggcgaagtgattccgccgtctttgcggtaaattctttacctataagcatccgcatccgcttatggtctgattgatttttaaataacagcatatcgtgctggatatgagatagattttgatatttcgttgaagcttccggaaaagggacgcggtttttaaaccgggtgtctttcaaaatcgctgccgcttctttatacccggtgacataccagcccggatgttttaatacggttcctttataaacaggatcaatggcacgcagtttttcataaaacgggtaagggtcattccaaaaatccgaatccgcatggagggacggatgtgcagtcgataggcccgccgtcatcttatacctccgtattgcaggcggattgcaggccggctttcatttcttcaacggattcgacttcaaaccctaaatcatggagcatttgatgatcctctgtttcatgctgccctgctgtcgttaagtaatctccgacgaaaatcgaatttgcggcgtaaagtcccagcggctgcagcgaacgaaggttgacttcccggcctcctgagatacggatttcttttgtcggattgataaaacggaacaaggcgagcactttcaggcaatacaccggatgtaattcgcttaccccttctaacggagttccgtcaatcgcatgcagaaaattaaccgggatgctgtcggcgtcaagcgcttttaagctgttcgccatatcaatgacgtcctgtttcgtttctttcatgccgacgatgacacccgaacaaggcgacatccccgattgtttcgccgtttccactgtattgaccctgtcgtcatacgtgtgggaagtcgtaatgtttgagtgattcctttgtgatgtattgatgttatgattgtaccggtctactcctgcctgtttcaggcgctctgcctgttccggcttcagcagaccgaggcatgcgcagatttttaaaccgtaagtttctttaatttctttgacagcatcaacaacttgatctacttctctgtttgacggtccccgcccgctggcgacgatgcagtatgtccctatattcaagtcatgggcgcgttttgcccccttaagcaatatatgcttatccaccatccgataagactcgatcggcgcttttgatattgaagattgtgaacagtacccgcaattttccggacacaggcctgattttgcattcataatcatattcagctttactttttttccgtaaaatcgttttctgatatgaaaagcggcatgcatcagcaataaaagatcctcatcaggacaatttaaaatggccagcgcttcttgattcgttacttccgccccgtccagaactctctctgcaagatccatccattgattcatgtttatctccccatttgtgtcagattcatgaaagaggaaacatctatatgtttctcaatcatgtgttgaatgttttccggtgaaacgtgatccagcttcggtgtgattcccaaaatcggaactttgcataatgtttcaatcatgctcgggtttgtcttctcgtccagccccggccggctctttacgccgttgataataataccgagaacctctattcccatgtttttcgcatattcaacggttaaatatgtgtggttgatggttccgagatcaggcctggcgacaatcactgccggtaattccaaggcttttatcaaatcactgactaagtaattttcaccaagcggaacggaaatgccgcctgccccctcgacgatgaaacactcatgacgatttttgatcttactccagtgggccatgacttcatccatgctcacggatttcccctcaagcatggcggccgtgtacggcgcaagcggctctttccattcaaatggcgtgatttcttcatgagacagtgcggtttgtgacatgtttttcaacagcgaggtgtcactttccggatgagtccgcggcacgccgcttaaaaacggtttaaacactccgatatccgcctgtttctgcctgaatgccgcggcaagtccgcaagaaacgatggtttttccgacgccggtatctgttcctgtgacaaaaaaacttctcatttgtttatattcagctcttttctaatggaatcaaatgcttccgtcagctcgtctatgtcctgtaagctgcgatccgccgtaacggtcagcctgattctgctttcgccttccggaacggcgggcgggcggatggccggggcgcagattccctttttctcaagcagcgcagcggctgaaaccgctgtttttgcatcaccgatgataacggggataatcggtgtatctccgcctcttacagtaaagcccatatcggccagacgcgtttttatctttttgacagacgactgcagctcacggcgcgtatcgtgcatatctgatatgaggtcaaatgccgtatgcgaagccgcacaaattgacggcgggagggccgtctgaaaaataaacgtccgcgcctgattcagcaaaaaatcaataaaaatgtttgatcccgcggcaaaaccgccttccgttcctacagctttgcttaatgtgccgatgacaacatcaggacaaacaccgaaatagtcactggttcctccgccgttttccccgagtataccggttgcatgcgcgtcatctgctatcacaaatgcctggtactgctttgcaagcggcattattcggtcaagaggcgcgatggtgccgtccatgctgaaaacgccgtctgtgacgataaagcggcggttccgagtctggacggaggcaagttttttctcaagatcagccatatcaatatggcggtacacgatggtttccgcttttgataaacggcagccgtcaacaatgctcgcatggttcagttgatcgcttaaaatgacatcgcctttttgaggcagtgaggcaagcacgccgatattcgccaagtaaccgcttgaaaataataaagccgcttccgtctgtttaaagtcggagattttttgctcaagtttttcgtgccacacagtatttcctgtcgttaaccgtgagccgccgcttcccgctccgaaccggctcagcgctgtttgcgcggctgtgatcagccgttcatcttttgacagacctaaatagtcattggacgcccaggtctgccgcttttgccccttggttttaagagcggtttcctgtgttcgcagcgtccgatacagcccgtctcttttcaccgcatcgagccttccgaggagccatccgtcaaaatccacggccggtcacctcggctatcgcttctttcataatggagatcatggcttgtaattggtcggttgtgctggcgagcggcggaagaaaggcgatgacgtcaccgagcggccgtgtcagcatacccagctctctcattttcaaggacaccttgtatcccatccgcttttcaggcggataaggctgttttgtccccttatcctgcacaagctctatgccgcacatcaaaccgagctggcggacatcgccgacatgaggaagcagcttcagatcatgaagaaattccgcagccgtttttgatttttcggcgactcgttcaacgatgcgctctgattcgaataaacgcagattttcaattgccgcggcacagccaagctgatttcctgtataggaatggccgtggaaaaatgttttcattttgtcgtagtcatcgtagaaggcttcataaatggcttctgtggcaaacgtcacagcgatcggcaaatagcctcccgtaatgcctttccctgccgccatcaagtccggctggacgttttcatgctcacaggcaaacatttttccggtgcggccgaaccccgtcgccacttcgtcaacgatcattaacacatcatatgccgtacacagctttcgtacgcctgccagaaagccttcaggcatgacgatcatcccggatgcgccttgcaccatcgattcaatcgtaagtgcggcaatctcttcgtggtgctttgcaagcagctgttcgagcgcgtgaaggcattcatcccggcactgtacggggtcaccgctttcagatctgtatacataaggaatcggggctttgtagctttcaaacatcagcgggccgtacacatggtggaagagttcaatggagccgacgctgacggctccgattgtatcgccgtgatagccgttctgcatcgaaataaacgtctgcttcttaggtctccctacgtttttccagtattgaaaggccattttcagagcgatttccattgcttccgctccgctgtcggaataaaaaacgcgcgtcagcttttccggtgtgatgcccgtcagcatctcggcaagttctgttgcgggaacgttcgtcatacccagcaaagtcgaatgagcgattttttcaagctgtttttgaatcgcttcatccatttcttttttgcggtggccgtgtacattgagccatactgaagaaaagccgtcataatattcttttccgctgatgtctttcagcatgatcccgtttccgctttcaatgatgaacggatcttcatcgtaatctttcatttgtgtgaaaggcagccaaagatgctgtttgcttttttcaatcattgattgtttcatatgttctcctcccgctgaatgaatacaggctgcttctctaaaaaatggatacagctctccgtatctatggagccatcagtaaagaaaacccggcatccgctttcatctccggcattcttcatcttggcaatccgctgatatcccagcttctttgcagcaacgtaacctgttatgtaatcagggtcatctgaccagcacaattcggcaataattcccggatgtgcgcaaacttttgccgcgatggcatgtgcttcttttattcgtgaattttccggcatgttgtgagtaaaagcccatttttgaaaatcaggtgacggccaatccactcgggatacccgcacacctctattccctctgcagtcaatgcgttttcctgcccggatatcaaacaggaccgctcctcttgcttctgcatattccgaaatgttttcgtacgctttctcgatcatgtgcggaggaatccccgccttttgcagaagcttgcgggcgattgcttgtcctttttccggcgtgtctgtttgatggagggcaaccggcaaagggcggatcgtttcgatcggttcatgaacgctttcaagctgaatctgcataaaatcaggtatccctcttgagtgtgagaagcctttatgtaataagccatctaccgcttcctgtaaaccgctgtaagtgatgagccgttctccgccggaaatatgttttccgccctgctcatggggggcgtttcgggaagctctcattctgacgctgtaataggtctcttcctgcatgaaatttccctcctttcttttatttcgaaatttaatgttaaccaaaataataaaaggttaacactaatacagaatattagtgtcttgcacgtaatatgtcaacctaaaatataaaactgttaacttaatgggttttacaaagcctcattacgttttcatgttttgttcatattttagtaattgtttattcaacactgtccgctaaagtaatccatatcaacaaataggacagcgatccgcatcttacttatgaagggaggtcaaaaccggatgccgttatgctgaaagaaaaagtaaagacagcaggccgtttttgcaccgtgggcgccggcaatacgctgatcgattttggtgtcttctttcttctcaccgcttgccttgtcccctatctgccggcgcagatctgctcctattcggcagggatcatcaacagctatgtgtggaaccggaagtggacgtttcgtgtaaaacacaaggctgacgggaaagagatcgtgcgctttctcatcattaatcttgcagcgtcgggaatcacctttttgctgctgtacgcgtttcaaaaaggcggctgttcgcttttggtgagtaagctcgccgccactatcggcggaatgatgatgaattttatcggaaaccgaatctgggtatttggagattcgctgaaaaacatacaggatcaggagtgaagatgaatgagaaaaaaagtgagaaaagcggtcatccccgcagcgggtttaggaacgagatttctgccggcgacaaaggcgcagccgaaagaaatgctgccgatcgtcgacaaaccggccatccagtacattgtcgaagaagcaagagagtcaggaattgaagatatactgattattacagggagaaacaaacgctcgattgaagatcattttgaccggtcggcggagttggaaatcaatcttaaggaaaaaggcaagtcagagacactgaaggaaatgcagcggattgccgatttggccaatattcattacatccgtcagaaagaaccgctcggactaggccatgcggtgctgtgtgcggagcattttatcggagatgagccttttgccgttctattaggtgatgatattatggtatctgacactcccgctctttcacagctcatagacgtctataaccaacacggcacagaaacgatcggcgtacagcccgtcgatcctgctgatgtcagcaaatatggtattatacagacggggcggcagagcggtcatgtgtaccgggttgaggatctgattgagaaaccggccgttgaaaaggcgccctctcatattgccgtgttgggccgttacatattaacccctgccatttttaaagcgctgaagacgatcggaagaggcgcgggcagcgaaatccaattgacagacgcgctgcgcgaagtatgccgcacccgaagcatttacgcgcgggagcttgaaggaagccggtttgatataggagataagttcggctgttttaaggccggcacggagatcgggcttctgcgggaagaaatgagaccgaaacttttagcttatttagaagaggtgttaaaaagagaatctgaagaaatcgtgcgttaaaaaataatttgtaaccattttgcttgtcaatcagtcatataattgggtaaaaagataaagaggttgtgaacagtgtgggcaattttattagtgaaatattatcctggctgacaagtatgggctatttagggattgcgctcggattaatgatcgaaatcattccgagtgaaatcgttctggcttacggaggctatatggtgtcagaaggcacgatcagctttatcggcgccattgtcgccggtgtgatcgggggaacgatcgcgcagtgctttatatactggatcgcccgttatgggggacggccgtttttggacaagtacggcaagtacttacttctgaaaaagcatcatgttgatgttgcggaaaactggtttcgccgttacggcgccggcgttgtgttctcggcgcggtttatcccggtcgtcagacatgcgatttccatcccggccggccttgcgaaaatgcctctttccaagtttgtcatattgacgacgcttgccattattccgtggtctgtcattttcgtttatctcgggtatcagctcggggacagtggaaagacgtagacagctatgccggaatgtatacaactccgatcattatattggctctcgtatttattgttgtttattttgttgtgaagaaaatgagatcaagactgtgaaaaaagactgcataagaacggctgcgagccggatctatgcagtctttttttatttataccgggtatacggggtgtttccggtgtgtgaatgtcagttgtttggacatgtaagcagtgaggcgtttattgagttcttcccgcaaggaatcagcaggaacaatgccgtcaatcaccatttcagaggcaagccggtaaaggttaatgtcttccttatattcatcacgcttttcttgaataaaagccggcctttcttcaggggccagctcgctgattttgtttgcgtagaccgcattcaccgctgcttcaggacccattacggcaatttgcgcagtcggaagcgctaaacagcagtccggttcaaaagcaggccccgccatcgcgtataatccggcaccgtaggcttttctgacgataacggaaagcttcggaacagtcgcttccgccattgcggagatcatttttgcgccatgcctgatgatgcccgcctgctccaccttcgttccgatcatgaatccgggaatgtctgctaaaaacagaagcggaatatggaatgcgtcgcacaaagcgataaattttgcggctttatccgccgaatcgagaaataaaactccgcctttgacacgcggctgattggcgataatgccgaccggctgtccgtgaatccgcgcgagccccgttattaattcctgcgcaaataacggtttaatctcaaaaaacgagtcttcatcaatgacacgttcaattaaatccatcatgttgaacggtgcgttttgatgtgccgggatgacatctgagagcggtttttcaaaagctttcgggttcttagatttgttgacgggcgctttttcagtataatttgccggaaagtagctgagatatgtctgcgccatcatgattgcttcctgttccgtcggggcgaggagatcaccgcagcctgatacagaacaatgcatacgggcgccgcccatttcttcaagcgatactttctcgccgatcaccatttctgccatgcgcggggaacctaagtacatggatgcattgccttcgaccataatgacaatgtcgcaaaaggccggaatgtaagcgccgcccgcagcggaaggaccgaacaataaacagatttgcggaatgcggcccgacagctttacttgattataaaagatgcggccggctccccttctgcccgggaacatgtcgacctgatccgtaattctcgcacctgcggaatcgactaagtacaagagcggacactgaagcttctccgccgtctcctgaatgcggatgattttttccaccgttttcgcgccccacgagcccgcctttacggttgagtcgtttgccatcacacaaacggttctgccgccgatggttccgatcccggtaacgaccccgtcagccggcagtccgtctgacatgcactcggcgaaaaaagcgtcttcaacggatatgccgtcatcgaataaaagcttcagcctgtctcttacaaaaagttttcccttcttttcgttgcttgcatgatatttcgcggctcctcccttttcaatcgttttgctgcgtgtctgccgttctttttcgtaatccatccgagtccctccatgttttattttcctttgtattcagggggtcttttttctttaaaagcgcgcaggccctcttctctgtcaagtgtagggatgacttgttcatatgcttttcgttcgatttcgagccctgtattgagatctgtctccagacccttgtttatcgcggattttgcttgtctgacggcgatcggcccattagcggcgatgcggccggccagtgcttttgctttttccataagttcatcggcttcacaaacatgctcgatcagcttcatgtcttttccctcttcggcagaaagccttcggccggtatagatcaattcttttgccgcgccggggccgataagccggggcagtctctgcgttccgcccgccccgggaatgattgcaagccctgtttcaggaaggccgaggcccgcccggctgacggctgttctgatatcgcaggcgagagcgagttcaaggcctcctccgacagcggttccgttcagcgctgcaatgaccggctgcgggagagcttcaatggatgcagccgtttcaccgatacgcctgacgctttgcttaacttgttcatgattcatcccagctctttcttttaaatcagcgccggcgcaaaatgtgtttccggagccggtgagaataacacagcgaatggatggcgagtttttgatgtcttcaatcacacgctgtaaatgatcaatcatttctgaagacagcgagttggccgcatgcgggcggttcagcgtgatcagaccgatcgtttcttgacagacggaatacaagacgcaatctcccatggcttctcctttctcatttcgttctgaatgcctgcagatttctgcttggcagatctttgcctattttatccgcgatccagcgggcggcatcaagaagtttattcatgtccgtcccggtatcaatccccatttgttcgagcatataaatgacgtcttctgtggcagcgttgcctgctgatccaggggcgtacgggcagccgccaagcccgcctgaggaagtatcgaaggatgtaatccccatatcaagagcgggaatgatattcgctagagccgttcctcttgtatcatggaaatggagtgcgatttttgaggcgggaattctcggcaaaagggcttcaagcacggatatgacctgcaaggggtttgccgcgccgatcgtgtcgccgagcgatatttcatcaacacccatttcgagcagtgtgtctgacaggcggatgacttgttcgaccggcacgttctgttcgtacggacagccgaacacagtggacagataagctctcgtcgccattttttcagcttttgcttcagtaataacccgcctgagctcttgaacggtccggtcaatcggtttgtttacgtttttttggttatgggtttcgcttgcagataaaaatacacaggcctgatcgattccgccttctgccgcatgctccagtccgatgaggttcggaacgagcgccgcgtagaccgtatgttcagacctggcaatgccttttgcgacgtccaggctgtcacgaagagccggaatccatctcggatgcacgaatgatgtcacttcgatatagggaaggcctgtttttgacagcatattgatccactcaatcttatcttctgtatccacccacgccgattcattctgcaagccgtcacgcggtcctacttcattgatgcggacatattccggacagttcatgctgcacctcccgttttattgaagttcaatcaggacctctccttcatcagtgaaatcaccttctgattttttcacttctttcaccgtacccgctgcatcagcgataatcggaatttccattttcatagattccaagatggccacttcctgtccttcttcaatgacatcaccgggcttcacatgaattttccacaggtttcccgccatctgaatttttatgacgctcattttgacgccccctcgttcattgtttgtaaaaaaccggttgttgcctcacccttttcaaacacttctgaatgtgcaatttttgtaagcagcggaatgttggttttaatcccttctacatgatattcgccaagggcggttttcagttgttcaatggcttgttttctcgtattcgccgtgacgatcattttggcaatcatcggatcgtaaaacggagaaatgacgcttcccttttcgacggcgcattcgtgtcgcactgacgggtgtcttaaaacggaaaaagacgagatggtaccgggtgacgggtaaaaggtgaccggatcttccgcatagatccgcacttctatcgcatgaccgcggtggttgatatctttctgcgagaaagtcagcgcctgcccggcggcgattttcagctgttcttccacaagatccagtcctgtaatttcttctgtcaccggatgctccacctgcagtcttgtgttcatctctaaaaaatagatttgtttcttttggtcgacgagaaattctattgtgcctgcattttggtagccgatcgatttagcggctttaacggcggtttcaccgagtctttgtcttaattcatcgtcaacaaacggcgacggcgcttcttctatcactttttggtggcgcctttgtactgaacagtcacgttcaaacagatgaacggtgttgccgaaagaatctgcgagaatctgaatttcaatatgacgggcattttcaatgaccttttccatatacattgcgccgtctccaaaaaaggacgcggcccgcttttgattgccttcgaacgctttggccagctcttcttctgaatgtacgatctgcatgccgattccgcctccccctgcagacgctttcagcataaccggaaagccgatggcacgggcttcggctaaggcggagtgaacatcgggcaatggctctgaaacaccgggaacgatcgggacctttgctttttgcatcgtttttcgggcttctatcttgctgcccatcttggcgatgatatcaccgggcgggccgataaatgtgatttgttccttccggcagcgttcggcgaacaggctgttttctgacagcagcccgtagcccggatgaatggcgtccgctccggcggatttggcggcttctatgattctgtcgatatgtaaatagctttcatttactctcgatttaccgatcggataggcctcatcagccgcttttacatgcagcgcgtccctgtcggcttctgaatacacagctgccgaggggatgccgagacgtttgcaggtgcggataattcttaaggcgatttctcctctgttggcaatcaggacttttttaaacaaatgtgaagcactcctttttcattaagttaacttgagctcttcaatcgttttttcccgcagcttgaatttctgaatttttcctgaggctgtcattggatattcatctgtaaacaaaacatacctggggactttatagcgggcgatatgttctttgcaaaaggttctgatgtcttctgcggaagcggtttgtccgtctttgagcctgacccacgccgcggcctcttctccgtatttcggatcaggcacgccgacgacctgaacgtctgccactgcgggatgccgatataacatttcctcaatctcgcgcggatagatattttcgccgcccctgatcagcatgtctttcagacggcccgtgattttgcagtacccgtcctcgtccatgacagccaaatcaccggtatgcagccagccgtccttgtctatcgcttcttcggtcgcttcttgatttttatagtaacctttcatgacatgatatccgcgggtgcagagctctccttgttcgccccggtcggcttcttgggatgttccgggccgaacgattctgacttcgatatggggaagcgcgcgccccgctgtttccactcttctttcaaatgaatcatccgttcttgtctgcgtaatgacaggtgatgcttcggtctgtccgtaggcaatggtaatgccggtcatccccattttgccgatcacttctctcatgacttccgccgggcatggcgagcctgccataatcccggttcggacgtgggaaagatcatattcagaaaagcggctgtcatttaggagggcgataaacatcgtcggtacaccgtgcagagccgtgcaggcttcttgctccaccgttttcagaacggccggtggagaaaactgttcgatcggaatcatcgccgcacccgcggaaacacatgccagcacgccaagcacacacccgaagcagtggaaaaacggcacgggaatacataaacggtcacttgaagtaagcttcatgcattctgcgatattggccgcgttatttacgatattaaaatgtgagagcatgacgcctttcggaaatccggtcgtacctgatgtatattgcatatgaatgcaatcatcctttttcaggctgtccatccttccgtcaagcgctgcatccgttacagcttcgccttccttcagcaaagaatcccagcggtgcatcccgggcggacttttatcaccgatatataacaccgtccgtaaaaaggggtaacgtttcgaacgcagcctgccgtgctcacaagttttcagctccggaatcagcttattcaccatctcaacataagatgtctgccggtaggaatccatgattatcagggccgagacgtctgaatgcgccagcaggtaatcgagttctgcgatttgaaaatttgtattaatggtgaccagaacagcgccgattttcgccgttgcaaattgcgccgcgagccattccggtatgttggatgcccatatggccacatgatctcctttttcaattcccagtttcatcagcccttttgcggtttgccggcataaccggtcaaactcggcatacgtataacgaaggccgcgctcagggtaaacaaccgcttcatgatccggaaaaagctccgcggtccgctcaagcagctttccggctgttaaatggataagttcagccatatgacctgcccccttccatccctgtcttagtaaacgttttcatttcacttcaaaagctgtcttgcgatgaccattctttgaatttctgatgttccttctccaatctccatcagctttgcgtcacgaagcatacgttcgacaccgcattccttcatataaccggaaccgccatgaatttggatggcctgaaggcaggttctgacggccatttctgaagcataaagcttggcgaatgccgcttctttcgtaaatggcaggttttgatccttcagccatgccgctttaagcaccatttgtctggcaaggtcaatttccatcgccatatcggccagcttaaattgaatggcttgaaatgacgatatcggactgccgaactgcttgcgttccttcgcatatgacagcgacgcctccagtgcgccttgagcgataccgacagccagtgccgcaatcgagatccgcccgccgtctaatgtatataaaaattgtttaaaacctttttcaggatcaccgagcaggttatcggcaggcaccctgacatcctccagcacaagctcggccgtatccgatcctctcacacccatcttgtcgtacggatttgtgatcgtaaatcccggtgtgtctgtcgggacgatgagagctgaaatgatcggttttccggcggagttctttcccgtaacggcggtgacaatgaccgtgcgggcgtaatttgcgtttgtgatccagcatttttctccgtttatcacatagtcatcgccctttttctcggcttttgtctgggtgccgccggcatctgaaccggcattcggctctgtcagcccgaatgatccgagcgcttttcccgaagcaagcggaacaagatgttcttgcttttgctgttcagtaccgaaatagtataatgggcttgcgccgagtgacacggctgccgcgtagctcagccccgtgctgccgcaggcttttccgatttcttcgaccgctgctgcatatgaaatggtgtcaccgcccgccccgccgtattcttccggaaacggaattccgagcagcccgagttcgcctatttttttaaatgtgtctatcgggaagacggctgattgatcaacctcatgggctttcggggcaatttcatttttggcgaaatctctgaccatttcgcgcaccatctgctgttcttttgtcagttgaaaattcattaaccttcctccttctgctgctttctacattttattaatgggggtctttattcattccatccaaataaagtctgaacattcggactcatccgccgcaaaaaaaaactgacagtgccgcaactgtcagttttattaataatggctatttaatcgtccgttttgcggagggacggctctcatggtgaagcctgtcaacggaagtaacgatataggtgcatgcttcttccgcccgaataacagtatctgaaaatgtctgcgtccgtgacgatgtttttctgactgtatccactaaataaggctgctttcccttttctgcgcggtaaatggcgtaataagccgtttttttaccgttggatttcgcatcttcgatatagagtgtatggcctgaagcgttcttctccgcccgtttgacagccggtttttttaaagcggaatgtccgagccaaggcatctcgggaattaatgcgggccggctgtacatgtcattgatcaaacggtttttcacatcgagcggattacggtttaaatcctttaaactgaaatgcatgctgccttttatccatgctgatcctctgtttagcgtaatctgtcttccgtattcccccgggtcggcccaggccggatcagtattgttgttgattttataagctgcctgcccgatatataaatgcaccggccgattgttcacttcttttccccaccaatccgctaagacgtcatatgccgccgctttaaatccgatactccagtaaatttgcggtgcgatgtaatcaatgtatcctttttggatccattctcttgtatcagcatataagtcatcgtagttccgcaccccggcggccgtttcggagcctgtcggatcatctgcggcatttctccatacgccgaacgggctgattccgaatttgacataaggtttttctcgtttgatggtttcgttgatttcttttacaagccggttgacgttatccctgcgccagtcatcaatcgatgcaaagtgagcttttccgtaccgttcgtattccgcctgatcggggaattcctgtccggcaattttataaggataaaaataatcatccatatgaaccgcatcaatgtcataacggctgaccacttctttgattccatccgttataaattgtcttacttccggaatgcccggattatagtacagctgttttccgtatgcagcgacccagtccggatgggaacgcgcgggatgatcatctgaaagcgcattcaaatttgtgtgattcatcgtgatccggtaaggattgaaccaagcgtgaaattcaagattccgtttatgtgtctcttcaactaaaaaagcaagcggatcgtagccgggatttttgccttgggttcctgtcagatactctgaccaaggcccgtaatctgatggataaaaagcatcagccgcaggcttaatttggacgataacggcgttcattcccatcttctgaacgtcatccagcagcttgctgtattctcttttttgctcttccggtgacagcccttttttagagggccagtcgatattggtgacagacgcgatccatacggctcgcatttctctctccggctgagtgccgcttgcttgtgcggatgctgagaacgtaaagatgccggctgtcagtacaacggccaaaaaccatatcatgctaaaacggcagcttttcatgtttttccccctctctgctttacggtattccgaagcattccgggcggtgaatcagaaagcctgctttgctcctctcagcctaaaagggaaagaaaaaagtcctaaagcgaatcaaaacgcttcaggactttttatgttttatggcggcgagcacgtcaatgaccttcgttccgacgccgacgcatgtttcaagaatggcctgcgctccggcaatggacaaaatgaaaataaccggatgtgcatagcggggccagaccaaatagcagatgccgatcaatatggcgcaccagacgcccgcacaccaataacattgcagcatataaccgaatgcggaggaagggacttttttttggacggcgcgcccgttttgatcgacggttttttcttgctttataaagggttttcttatgaattccgtaatcttatcaaatacgatcaaatgggtcagccggtagctggcaagaataatcattacatacgtaagccaagataggttcgtcatctcaaagcctccaaaaaaactgagtgtgattcccctatcttgccctttgtcttcttcagtcattctgccggatgttacagattccgcgccaagcgtcttccgctgtttgcgatgatgtccagtatgacctcggcatttttgtgtgcaaactcgggctcaaacatatctttatgggctccctcgccctgatattcctggtagactcccgttgtggcgccttcccatttcatcggctcggtcttatcactgtgctcttcctttatgccggcctcaataaaatggagatttgccgcaatttggccgtcatttatcagttccgcccagtacgtttgatagcgctctgtttttctgatgaccgcttccctgacggcttccgggacattttcggctgttgcgtttgttggctgcggcggcagtgcgtcaagctttctgtacgcgtctgcgataatgacgtcgctgatttctaagccgcgcttttccatcgcttttgcagcctcgaatgccgtattgccgcccgctgaatatccgaagaggatataagggccttccggctggatttccagcattttatcaatgtattgttccattctgctgtcttcttcaataaagttaaaaccgtacacagcagcccgtccatttaatgccgccgccagatctttaaagaaaatgccgaaacctgagataggcggaaaacagaaaagattgcggcctttcggctgattcagtctgctgatatgctgttcggcagcttctgacagtgtgtttgaatacagcttttcagccaattgttcaattgtcggatattcaaatatcatttcaatcgggacgtccatctgctgcctggtcttcagctgatgaatcacttgcaatgctttcaaagaatggccgcccagctcaaagaagtcatcctgtatgcccagctccccgcagccgaggatcggcgtccaaatgtcgatcagctcacgctctacccagtttcgtggcggaacggcttttgatgaagcttttttccgttccggcgcaggcagcccgcggcggtccactttgccgtttgcggtaagcggcatacggtcaagcttcatcacatactgcggaatcatatagtcgggaagcgacctggccaatagggatcgaatggctctttcttcagcatgtgcgcctgtataatacgcacaaagggttgcttcttgtccttcgtctgacacgatgactgccgcttccctgattccatcaatttcagtcagccgcgcttcgatttcggccggctcgatacgcttcccgcgaatcttgaattgacggtcgatacggctgatgtatccgatgcttccatcaggcagccagtgtgccaaatcccctgttctgtagatcttttcttcaggatgaaccgggtggctgacaaatgcttcacttgttaagtcaggcctgtttaaatagcctttggcaaccccgtccccgccgacacaaagctcaccaggcacgccgatcggcgcaagtccgccatttttatcaatgatatacgcggttgaattgctgatcggttttccgattgggatcggctgagaaaaatcgtgcctgatttcgtaaaaggtagaaaatgtcgtattttccgtcggtccgtatatgttataaaggctgagattcggacagcggtgtctgaccttattgatgagcgccggggacaatgcttctccgccgacatataaggtgtgcaatccgcaaaacatctccggatccgcctgggcaaactggttaaaaagcgccgtcgtcaaaaacagaatcgtaataccgttggaagaaagataattgccgaacctctcaggggcaagcattgtcgtgcggtcaaccacatggaggcacgctccgttcaatagcgctccgaagatttcaaacgtcactgcgtcaaaaccgatggatcctgtcagaatgagacggtccgtcgtgccggctgacgtgtaattgctgtttgacacgagcgatacgacgttgcggttggaaatcatcacacccttcggttttcctgttgaaccggatgtatacataatataggcaaggtcatcaggtgacgtaacggtattcagttttccctcatcagctgtttgtttttcagctgcagccgggatagagatgatgtgagaaaagtcaatgtcagtctcaatccctttttgtaccgttaacagctgtgctccgctctcagtgagcatttcggcgatcctgtcggatggcagttctgcatcgagcggaaggtacgtccctcccgctttcaatacagcgagaacagcgatgataaattccggtgagcgttcggcaagaatcccggcaattccttttggcgccaaaccgttttccagcaggatgcgggcgaacgcagttgaccgttcatcgagctcccggtacgtcatcgtcagcccgccggcgtgaagcgcctgatggtccggggttttcttcacctgtcggctgaacaggctgatgatgctttcgtctctttcatacgttgttttcgtgtcattaaattcgccgattattcttgatttttccttttgtccgagcatcggaagccgatcagcgggaacatcgggattgaaggcggcgccgcgcagcgcttcttccaagtgtccttttacgctctctatccatacttcgtcataaacgttcgcattgtagctgaatttgatgatcagctcatcgccgggcgctatgatgaggttaaaatcgtagcccgattgttccgaaacattgacattcccgatccggaacggtgcatccgattccttttccgcgtctctcatctgctgctgaatcggataattttcaaacacgatgatatggtcgattaaatcctgtttcagctcagtctgagattggatgtcagcaagcggatgataactgaacgcctctgaatcaagcatttctttctggcagcggcccagcagttctctaaagctttcgtcacccgttttaatgcgtaccggcacagtattgataaacagcccgatcatgctttccacgccgtcaatgacggaaggccgccctgatacgacggcgccgaatacggcatcgtccgtccggttgtagcgctgcagcatcaggccccatacagtctgcataagaaccgcgagcgtagcgccctcttctttggcgatggttttcagcctgtctgtcagattttgatctaaagaaaacaggagctctttcttacggtagccttttccctggggacgggccgatattttcgggagtcctgagggtgtctcgcagcttgctaaatatcctttccaatactcagaagccgcgtctttgtcctgatcagtcagccatgtaatatacgtgctgtaaggctttgcgggcgccagtgtgacgggtgagcctgattcaatcgcccggtacatatgcatgaattcctgaaggacgatgccgaggcaccagccgtccataaggatgtgatggtggctccagacgcatacatatttttcctcagccgttttaaacaaagacacacgcatcagcatatccttttgcaagtcaaagccttttaagcggtcacgttccttaaatcgctgtaagtaggcgctctgttccgcttcatccaaatgtgtaagatcttcgcggtgcagccggaattcccgctcacgcagcacgacttggcgggggccgttcagctgagcgacatgaggtaaaaaaaccgttctgaaaatatcgtgacggctgatgacagactgtacgctttgctcaaacaattccggacgaagccggccttttatggtgaagacggattgctcgatatatgcagccccctccttttgcagaaaggaatgaaaaagcattccttcctgcattcggctgaggggataaatattttggatgttttttgttttgtccatgtgttcctcccgctcggtttagtggaagctgagtaagtcggcaatatcctgcaaggcttcctcagtcagctcccgatcatcaaagtcactgacggtcttctccgtatcggttttgctgaggcagtgttccgacagtttcaggagataataccggcagctttcggacagccgttcgatcgtatcttgccggaagcgctccgtttcataggaaatgctgacggtcatccggccttttgccgcaatagcgctgatttcaagtgactgctcccgtttccatgtatctgtgacatcatctccgcctcccaaaggagaaaactgaaacgcgtcaggctgttccgtttctgccggactcccgccgggcgcatcgaattgtccgagataattaaagctgatctccggtgctttcccgaaagtcatcccggcaagcttcggcggtgttaaatatttgaggacgccgtatccgttccctttatccggaatgcgccgcaatgtgtctttaacggttttcaatgtgcgaatttcatattcttcaagaggttcataaactccgctccggacaagcaccgggtaaatggaagtgaaccaccccactgtcctgctgatgtccgcacctgcctgctccgattggcgtccgtgtccttcaagggcgattttcaaagcgtgctgcggcgaccacttttgaagggcaagcacggcggaagccaacagcacatcttgcgtatccgtattgtaggcgctgtgcacatctttcaacagggcgtccgtttcactttctgtcagagtgaaggataccgtgttccgtttttttgcaggagtttgagatagatctgcctgctcgtaaggaagactttctgtttcatagtgttcaatctcccgccaatactccgcctgctgaagaagctgtttgctttcggcataatcggccagctgctccgtatatgttttgaatgacatggttttcggagggagtttgatttcctgtccagaggcggcctgctcataagcagaagccaagtcctccaataaaatccgccatgatatcccgtcgacagcgagatgatggaccgtcagaaacaagtaatcttctgcttcagagcggaacagtcccgcctgtaccagcggcccgttctccaaatccatgtttctctgaagctctgcgacgcggcgttttataaaacgttccttctcatgctcatcgccttccgtttctaatatggtcaggttgtaaagctgctcatctgcgaggtcagccggtctgttgaagaggagaagacctttctcttcgtcttttttgcagacaaggcgcaaagcatcatgatgaacggtaatggcttttaacgttttcctgagagcctcttcatctattgaatttgttctcgtcagcatgacggactggttaaaatgatttgcttccttcatgtcttgtgtgaagaaccatttgtgaaccggcgaccacttcacttctccttctgcaggagcttggctgaccggctgccgctctgtacggacataaggcgccagctctctaattgtcggccggctgaaaatatcttttacggcgatctgttttcctgcctgatgtaatcgggctgatacttgcagggctttgatggaatcgccgcccagttcaaaaaatgattgatccgcggcaatgttttcagttccgagcacttcgctccaaatcgcggaaagctctttttccatgtcgctttcaggctccgtaaatgcccgtccggtgtgcgcttttttccgcggctcaggaagcgcgcggcggtcaagcttcccgttcggtgtgacaggcagggcttcaagtgtttcaaagaacgccggcaccatataagcgggcatttcatttctgagcgcctgctgcacggtttcactttctgttccttcttctgtcacgatataagcgcatagttccgtttggcctgctgatgcggtatgagcggtgacggctgcttctttgacaccttttatgcctgttaaggccgattcaatttctttcagttccacccggtagcctctgattttgacttgctcgtccattcggccgatatattgcagcgtgccgtccggcagccattttgccagatcgcctgtgcggtacatgcgccggttcttctggaacgggtcttggacaaaggcttgggccgtttgcttaggaagattgcggtaccctcttgcaaggccggaacccgaaatgcaaagttctcccgttacaccgatcggctgcgggtgatccccgtttaaaatataaacgtgtgaatgctcaatcgtccggccgatcgtaatgttctcactttgttctatatgtcttgccgctgtagtggcgacgctgttttccgtcgggccgtactcattggcaagctccgtgtgaggacaaactgataaactgcggctgataatgttttggtcgacagcttctccagctaatgtgacaattctgagagactctgcatcccccggctccagtacgtcaagcagtgtacggtacagtacgggaacaatgatcatatgagtgatgcggtaagatgcaagatagtgtttaatggcaagaatatctcttgcttcatcttcggctaaaacggccgctttcgcaccggaaatcagcggtgtgaacatacttgttacaaaaccgtcaaatgaaaatgaaaaaagctgaagaaccgtatctttctcattcagatcataaaatccgcttcgccattgaagggtttggctgacggaacgatgttcgaccataacccctttcggcctgcctgtcgtcccggacgtgtaaatgatgtaagccaaatcttccggtgctgataatggctgaaccggtgatgcgtcttgttcttggatatcctccagtgcgagcacttcacctttaaaatgatcaggcacttgatctattgcgccgtgtacggtaaggagaagcgctgtgccgctgtctgaaatgatatattgcttgcgttcctccgggtattcaggatctatcggaacgtaggcgcccccggctttccaaaccccgaagactgcggcgacttgttccggtgatcttggtatcacaatgccgacggcggcattcggtccgatctgccgtttttgcagagctctggcgattttattcgaccattcatctaattctttatatgtgaccaacgtttccccgctgataagggctgccgcatccggtgtttttcgcgcctgagtgatgaacagttcatgaactgttttttcaggcagctgtttatccgtcatgccgttaaagtccgaaagaattcggtcccgttccgcagcagtcagcatgctgatcgcttgtatagaagtttccggttcacggacaatgtgttcaagcatcgtcataaagtgggaagcccagcgctgcatcgtttctttccggaataaagacgccgcatattcaaacagaaaatgaatctgtcccccgccttcagaagcctgcaaagtgacatcaaatttggaaaccggacgggacacgtccgcaggctgaatatgcaaaccgtccaacagcaattcctcatgttccatattctgaacgacaagcatggcatcaaatagcggattacggctcatgtcccgctgcacgccgagccgttccacaagctcttcaaacgggtagtcctgatgctcatacgcctcaagcgccgcctggcggacttccgccaaataatcggtaaaccgtttgtctcctttcggctccgttctgatggcaagcgtgttgacgaacatgccgagaatcggttcaaggtctttgtgcgggcgcccggcaatcggcgatccgacgatgatgtcttcctgcccgctcaatctcgcgagtaacgtattgtacgcggcgagaagcaccatatacaaagtggagccgtgatcccgggcgatgcggtgaaggccggatgccgtttcagcgtcaagcgtgcacgatactttcccgcccgcaaagcttctgaccgccggacggggcttgtcagccggaagctcaagcaccggaagctctccttcaagtcgcttcagccaataggcttcctgcttctggtacccttctttctcctgaaacgaccgctgccagacggcatagtctttatattgaaggcgcatcggcgcaagcgaacggcctgcgtacagctcgccgaattctttaatcaaggtgttgacggacacaccgtcagaaattatatgatgcatatccgttaataaaagatggcgttcatccgattctttcacgagagccgcacggaagagcggcgcttcttccagacaaaacggccggacgaatgcgtcagctgactcggcctcatcgagctgaaacggtacgctgtcatggatgcgctgcaccggttcgccgtcaggccccgtttcaaaggacgttctgagcgactcgtgccgctccacaagctcccggaacgtctcctccagccggacacggtcaagcgtgcccgtcagttccagcacagccggcatattgtagccgacaccgccgtcttcaagctgttggagcacatacatccgtttctgcgctgaagacaccgggtaggtgtcctgttttttcgcaggctgaatcgcttcatacgggctctcttccaagtcctgaataaccgaagcgagctcttccaccgtcggccgggcgaagatgtcctgtaacggcacctgaacaccgaactctttggcgatgcgggagacgagagccgtcgcttttaacgaatggccgccccgctcaaaaaagtgatcccggatgccgacggggccgtttttcagcacctcttcccaaagggcgcaaagcttcatttccgtgacgttccgcggggcggtgtacgcctgtctgtctgccgctccgccgggagccggcagcgcgcggcggtcaagctttccgctcggcgtgaccggccattcgctcatctctataaactgagccggcatcatgtaggccggaaggcgtgccgcaagctctgcccgcacgtcatcgctttttcgtccttcgatataggcgtaaagcgcggtttcgccgtgttcggtccgggcggtgaccgccgcctcacgaatgccgtcgatgcgccggatcgccgcttcgatttcccccggttcaatccggtagccgcggactttcacctgtccgtctgaacgcccgagccattcgacaaggccgtcttctgtccagcgtgcgatatcgcccgtctgatacatgcgttctcccggataaaacggatcaacgacaaagcgctcctccgtcagctcagggcggttcagatagccccgggccacgccggtccctgcgatatacagctctccgatacagcccggcggcagaagctgtttcttttgatttaaaatatacagccgcatgttatgtccggaactgccgatcggaacattgtgaaattcctttccttgcggcaaatcgaagtacgccgcttctaccgtcgcttccgtcggaccgtaggaatttgtcaattccgttcccggcagaaggtcataaaaacgggaaaccaagtgcgggcccaattgttcgcccccggcaaaaaccctttttaagcaggtctttttgatcggctgttttctggaatttatatattccaagaaagcatgaagcatggatggcacaaaatgagctgccgtgatgcggtttttctccaatgcgttcagtatcatttcagggtctttctcgccgccttgcggaaggagaaaaacagaagctcccgcgatcggccaccaaaacagctcccaaatcgaagcatcgaaagagtatgatgttttatgcaaaatggtgtcggaatcctttaatccataacgcgcttgcagcgagtataaaaagtttacggctgactgatgttcaacctgcacgccttttgggcgtcccgtagaaccggatgtatagatgatataagccaatgaatcaggctttaccggaacattggggttggccgcagcttccgggtttcctgtttgtccgcttttcagagagatcgtttctcccttaaaaagatctggtgcgaaaagttctggttctgccagtaagaatttcacgccgctgtctttcagtaaaaagcgaatccgctcttccgggtaatccggatcaatcggcagatatgcaccgcctgcttttaagacagcgtaaatgccgatcagcatgtcaggagaacgccggcccataatggcagttttatcctccagccttatcccccgtttgatcagccggtgcgcaagctcattcgctctttcgttcagttcctgatacgtaatcgaaatctcatcagttaaaatcgccggacggtccggcgttttttccgcctgttgttccagcagctcatgaaggggctgatgaagcggaaacgctgttttctgcaaggggctgaaattttgaagcagagacacttcttctttttctgacaaaacagaaatatcgtctaattccaaacccggatcagctgcggcgttttcagcaagtgtcgtgaaaaattccgcccatttttgaatcgtttttctctcaaacaaatcagtgctgtattcaaactggcagtacaattcaccggcgttttcggagatgtacagcgataagtcaaatttagaaatcggcaggctgacgtctgccggctgcagttcaagtccggctgccctaagcttctgctgttccatattttgcagcgcaaatgttgtgtcaaacagcggatttcgggacatgtcccgcggcacaccgagcttatcgacgagctcttctaacgggtaatcctgatgctcgtaagcctcaagcgctgtttggcgaatttcctttaaatattctttgaacgtcatgcttccgtcgggacgcgtcctgaaagcgagcgtattgacaaacatgcccagaacggcgtcaaggtcggcatgaggccttcctgcaatcggagacccgacaatcatatcttcctgtccgcttaaacgggctaacagaaccgtgtacacaccgagcagcgtcatataaagtgtgcatttgttttctttcgccagctttttcaactgcgctgtatgtttttcgctgatgacaaatgacacccggtcaccggaaaagctccgcaccgggggacgcggcttatcagccggcaattcaagcacgggaatctccccggcaagccggttcagccagtactcctcttgtttccgatatgcggcgcccgccttaaatgattgctgccagacggcataatctttgtattgaatccgtaacggcggcagacttctctcagcatacagctcactgaattcacgtatcaaaagattgacggatacgccgtctgaaataatatgatgcatgtcagctaaaagcagatgccggtctttttctatttggacaaatcccgcccggaaaagaggcgctttgccgagatcgaacggccggataaacgcttcggctgattgttcttttgtaaatgcaaacggcacttcgtcatgaatcctctgcacaggccggccgtttttttcttcaaaggacgttctgagcggttcatgccgccggatcagctccttgaacacggcttccatcctgtctcggtcaaacggccccttcacctctaaaacggctggaatgttatagctgacaccgccattttcaagctggtgaaggacatacatccgtttttgagcggatgagacaggataagttccttttgcttctgtcttttctatggatgcgaacggattctcttctgcttcaccgatgattttggcgagttcttctacagtcggatagctgaagacatcactcagcgggatttgcacgctgcactctttagctatttttgcaacgagtgccgtcgcctttaatgaatggccgccaagctcgaaaaagtgatcgtgaacgccgatcgggccggtttgaagcacttcttcccatatgcgggtaagcttcagctcggtcacattccggggagctgtatatcgacggcccgctgcgtacgccgaagcttccggaagggcccgctgatcgactttaccgttcgcagtgagcggaatcgcgtcaatgaaagcccatttgaccggaatcatataatcaggcagctctttggccaaatcacttcgcagctgagaaggatcagtcgcttgtgagacgctgcagtaggcgcataattcattttcgcccgactcattcgtttgaatcagcacggcagcttctttcacggcatgatgatttgccagaacggtttcaatttctttcggttcaatccggtaccctctgatcttcacttgatcatctgtccggccgatgtattccatttggccgtccgcacgcagtcttgccaaatctccggtccggtacatgacggcgccctttctgaacggatccggcaaaaatttctcttcggtcagcgccggattgttcacatagcctcttcctgtattcgctccggaaatatacaattctcccgcaattccgagaggctgaagctgtctgtttttgctgagaatatacatcttattatgatggatcggtttcccgatcggcggatgttcaggtatgtcatctcccgcagaaatcgtatacgttgaaaccacatgggtttctgacgggccgtaatgattatgcagctgcataccgtgtaaacggagcgtctgcctgaacaaacgtgagatagtcagctgctccccggccgtaatgacatgcttcacacagcggggaaaagactgtgcataaccttcttcattgaaaagcatcttgacaaacgcagtcgggaaaaacaccacttccgttttgtgctgatcgataaacgaatacagctgagaaacatcccgtttgattgattcgggcacgatacaaagggtgccgccgctcaagagtactgaaaataactcctgatagcagacgtcaaacgccaaagatgcgtactgcagcacatttgtgcaaaaatcaatgcctgtgttcgtcaattggtcagaaagaaggttggccatatttttatgttcgagcagcacgcccttcggtttccctgtcgtaccggatgtataaatcatataaaggaggtcgtccgccgtattaatggattgcacattgcttccgtccgcttccgtcccggcctcttctatatatgtaacctgcagcgtttgttccgcggggagtgactgatgccgctctgttacaacatggatgcagccgctgttttcaataacatatcggatacgctcctttggactgcccggatctatcggaacaaaggcgccgcccgcttttaaaataccgagaacggccgccgctaaagaaggagaacggccgagcatgacgcctaccggctcctcccgctttaatccgcgtttttgcagcagacgggccagcttattagccgattcattcagctctttgtacgtcactgacccgccttcataccggatcgcgatttgatccggcgtttgtgcggcctgccgttcaaacatcgcatgaatcgtgtcatactcaggcttttcagtctcttcagaaatcggcgcaagcagctgctctttttcctcaggagtgatgattacaagcttatccggcgtgatatcaggtttgtcgagaatctgggaaacgatatgtgtcaaatgacctttgatattttcgataaattggcggtcatacatgcttgaatcgtatctcattttcaagtgaatctcgtcacccggcgccaccatcaggtaaaaactgtaattggtttcgtcttccatgctgaaatcatggatgtgaaaaaggtctttcgtgtcccccttgctgttcagtacatcaagctcctgttcaaccggataattctcaaagacgagaatatggtcaattaagccttgttttacctgtgaattcgcctgtatatcataaagcggatgatagctgtatgcctgtcctttcaaagcgtccttttgcacgtttttgatcagcttttgaaacggaatgtccgccccgctgatccggacaggcacggtattaatgaacaggccgatcattcgctcgatgcctttgatttcagacggccttccggaaataacagaaccaaaaaccgcatcttctgtctggttatacgcctgaagcaaaatgccccagagcgtgtgaaaaatggtgctcagcgtgacctcttctttcacggccagatctttcagcttagctgtgtcctcttttgaaaaggaaaacgtcacttcctcttggctgctttcgccggcttttttctgcttcggcagaacagtctgctgctcaaagccttcaaggtatcgctcccagtacgaagcggctttttctttatcttgctccatcagccacttgatgtaggtcccgtacggcacagcgggctcaagcgttaacggtgtccggcggagccgcgaggcgtatatctggaagaactctttcagcacgattccgagacaccagccatccataataatgtgatgaaaactccatatgcacgtatattcacattcaccggtttgaagcagcgtcacccgcatcagcatgtctttttgcaggtgaaatcctttctttcggtctcttcgtttggcttcttcaatatgcttgatttgatcagccttgtttaaattggtgagattttcctcaatgatgctgacgttccgctcttttaatacgacctgctgcggcactgacacgttctggctgataaagatcgttctgaaaatatcatgtctttcgaaaagggcatgaacgctctcttcaaacacgcgggtgtcaaccttccccgttattgaaaaggaggcctgctcggcgtaagcctgtgattccttttgcaggagggaatgaaaaagcattccttcctgcatataagacagcggataaatatcctgaattgcattcttttttgtcatgttataatctccccgtcgcctttttctacagttcctcgacaaaactcgctatgctgtccaaatcatcagatgttaacgttttgctgctaaaatcactaacggttttttctgcttcctctttgcctgtgcagtgcgccataatatcacgcaaatattgctgtaaggtttgcagcagctgttccatcgtttctttgcggaagcggctcggcggatagctcaaactgaagtgcagtttatgttgagcggccatcgcgctcatttccaccgcttgttcccgctgccatgtcggcgtgatgtcgtgcccgctcgcaagaccggataaactgaatgtgggctgatcttctgtatcattgaattgccctaaatagttaaaactgatttcaggcgcttgtctgaagcggattgttttttgttcaggcggtgtcatgtattttaaaatgccgtagcctattcctttatccggtattcttccgagtgtgtctttgaccgtttttacagccgttccaagctcagcgcctgctgtgttcaagtcaatgagcaccgggtacatggaggtaaaccagcctacggtgcggctgatgtcgagctccggcatgatgtgctctctcccgtgcccttccatcgcgatgcgcagtctgccgccccctgtccagtcccgtaaagccaaagctgcggcagtcagaagaacatcttgcgtatcggtatggtaggcccggttgacctgctgaagcaaaacggacgtttcttcttctgtaagcgtaaagcttaccgtttgccgaatgctgtcggctcccgtctgatactgcggtttttcataaggaagtccggcggctgtttcttcttcaataaaacgccaatattcttcttcacgcatcagcttgctgctttttgcgtattctgaaagccttacggcgtattgcttaaacgaatcggtctttggcggaagctggaccggctgaccttttacggcttgtgtgtaagcggcagataaatcctccagcagaatacgccatgacactccgtcaaccgccaggtgatgtacggtgatgaataaataatcccctgaccgggttttgaaccagccggcttttaataacggtcctttttcaatatccatccgctgttggagcgcagccacttcatcttctatttctctttcccaagtatctgtctcagacagatcccaaatgtccaagctgtacagttcatctttttgaataccgtgattgatttgtctgatactttcgttttctgcactgacggtgatccggagtgcatcatgatgaatgacaagatgctccaaggcttgtttgagcggctgtttatgcaatgcgtcagagctgaacatcatgacggactgattgaaatgatttctgttttccatccgctgtgataaaaaccagtgctgaacgggtgtccaaggtatgtctccttccaccggttgctgatcgatgactctttccgctttccggataagaggcgcgagttccttaatggacggatgccggaataagtcacttgccgtcattttccacccatagcgtccgagccgtgcggcaacttggagcgctttgattgaatcgccgcccaactcaaaaaatgaatcctcaatcccgacttgttttgtgccgagcacttcctgccagatcacggaaagctgttcttcaagctcattgcggggagctgtgtacgcggtttgaagcgcgagctccggttcgggcagatttttccgatccaatttaccgttcggcgtaagcggcagcttctcaagttccatcatataggccgggaccatgtaattcggcagttgcttagaaagtgaagaacgcactttttctgtatccatgtccgcctgcagactcatatatgcgatcagttctttattgccggactgcccggttctgactgacacggcagcttctttcacgccgtccaggctccttagtgcggcttcaatctctcccagctcgacccgataaccgcggattttcacttgatcatccatccgtccggcatattcaatcgttccgtccggcagccagcgggctaaatccccggtgcggtacatccgttctccgggaacaaaaggattagggacaaatttttcttccgtcagctcagggcggccgaaatatcctcttgccacaccgtctccgcctgtgcataattcaccgatgacgccgatcggctgcggtgttcccctgctgtttatgatatatgcagttgaatttccgacagggcggccgatcgggattgaatgatcgtatgattgttcaatcaaaaagcaagtcgagaacgtcgtgttttcagtcggtccgtatccattccatattgaaagatgcggcagcgttttccgaacccggtttacatgacttggggacagtgcttccccgccgataatcaatcgggataatccggaaaacacgtgttcattttgttctgatagatgattgaacaaagacgatgtcagccacagtgtcgtaatgccgttttgctgtataaatgtttccagaacatcagagtcgagataggtttcctggtcacttacatataaagaagcaccgtttaaaagcggaccgaatatttcaaatgtcgttacatcaaatcctaatgatgaagtaaacaacagtctgtctttcggcgtaaaatcaatataattgctgtttttcacaagacggatcacacttcgctgttcaatcatgacgccttttggcgcacctgttgacccggatgtataaatcatgtaggccaatgattcaggtccgccgagcggttcgggattttccgaacttaagccggcctttgtttgaatatcctctatgaataaacgttttccggaaagcggcagaccgtcaagtttatcagattggagaagaatatcagctttacagtctttaagcatccattcagcccgttcccgaggcacatcgtcaccgataggcaagtaggcgcctcccgcttttaatattccgaggattccggaagcaagctctgttgtacgtccggttaataaggcgacaacactttccggaccgacgccatttgatcggagagccgccgctattctattagcccgttcgttcagctcacggtatgtcaagatttgtccatcatatacaactgcccgggcatcgggggtttcttcagcctgccgctcaaataaacggctgatggtttcgtgtcttgggtaatcgcttttcgtctgattaaactgataaataacgcgatttgtttcagcatcatccagtacgtgaatgtcaccaagcggtattgtttggtcttcaattacttttgtaagaatacgggtaaaataagaaagccatttttcgattgtctgtttttgatagatatctgtattgaattcaaaatcaaagctgatggaaccgtcagacccttctgccgcgtaaagcgtggcatcaaactttgcggttttatgacctgcatccgcggcttgagtcaaatgcagctcatttaaattcagggattcacgctccatattttggagcacaaacatcacgtcaaacagcggattacggctcatgtcccgctgcacgccgagccgctccacaagctcttcaaacgggtagtcctgatgttcatacgcctcaagcgccgcctggcggacttccgccaaataatcggtaagccgtttgtctcctttcggctccgttctgatggccagcgtgttgacgaacaccccgagaatcggttcaaggtctttgtgcgggcgcccggcaatcggcgatccgacgatgatgtcttcctgcccgctcaatcgcgcgagcagcgtattgtacgcggcgagaagcaccatatacaaagtggagccgtgatcccgggcgatgcggtgaaggccggatgccgtgtcagcgtcaagcgtgcacgatacgctgccgcccgcaaagcttctgaccgccggacggggcttgtcagccggaagttcaagcaccggaagctctccttcaagccgcttcagccaataggcttcctgcttctgatatccttctttctcctgaaacgaccgctgccagacggcatagtctttatattgaaggcgcatcggcgcaagcgaacggcctgcgtacagctcgccgaattcttttatcaaggtgttgacggacacaccgtcagaaataatatgatgcatatccgttaataaaagatggtgttcttccgattctttcacgagggccgcacggaagagcggcgcttcctccagacaaaacggccggacgaatgcgtcagctgactcggcctcatcgagctgaaacggcacgctgtcatggatgcgctgcaccggttcgccgtcaggccccgtttcaaaggacgttctgagcgactcgtgccgctccacaagctgccggaacgtctcctccagccggacacggtcaagcgggcccgtcagttccagcacagccggcatattgtagccgacaccgccgtcttcaagctgttggagcacatacatccgtttctgcgctgaagacaccgggtaggtatcttgtgtttgcgcaggctgaatcgcttcatacgagctttcttccaagtcctgaataaccgaagcgagctcttccaccgtcggccgggcgaagatgtcctgtaacggcacctgaacaccgaactctttggcgatgcgggagacgagagccgtcgcttttaacgaatggccgccccgctcaaaaaagtgatcccggatgccgacggggccgtttttcagcacctcttcccaaagggcgcaaagcttcatttccgtgacgttccgcggggcagtgtacgcctgtctgtctgccgatccgccgggagccggcagcgcgcggcggtcaagctttccgcttggcgtgaccggccattcgctcatctctataaactgagccggcatcatgtaggccggaaggcgtgtcgcaagctccgcccgcacgtcatcgctttttcgtccttcaatataggcgtaaagcgcggtttcgccgtgttcggtccgggcggtgaccgccgcctcacgaatgccgtcgatgtgccggatcgccgcttcgatttcccccggttcaatccggtagccgcggactttcacctgtccgtctgaacgaccgagccattcgacaaggccgtcttctgtccagcgtgcgatatcgcccgtctgatacatgcgttctcccggataaaacggatcaacgacaaagcgctcctccgtcagctcagggcggttcagatagccccgggccacgccggtccccgcgatgtacagctctcctgccacgcccgcaggctggatggttcctccgctatctaatacatacagacgggcacccggaacgggttttccgatcggaagccttgtccgtccgctgtcccgttttcggtcacagacgtaaaacgccgcatcaaccgtcgcttccgtcggtccatagccgtgaataagcatggtctccggcagaagatcggcaaaccgggcagccgtaagcggggaaagagcttcccctccggcgaacacgcgtgtcagtgttctgccgaggcgtgttcttgtttccgcaggctctgtttccagcgcgtctaaaaagctgttgaccatcgccggaataaaatgcgcggtcgtcaccttttctgaggcaaacgcttcaatcatccgcacaggatctttctcccagccggccggaagcagatacacggaggcgccggacatcgtccaccaaaacaattgccagatggaggcgtcgaatgaaaaggatgatttcagcacgataatatcctcttccgttaacggaaactgcccttgcatccctgataaaaaggcggcggcttgacggtgttcaacagccactcccttcggtgttcccgtcgaaccggacgtataaatgatataagcgagcgaatcagcatccgcttcttcagagacagcccctgtctccgtctcatttgtcagagaagaaagagacacttctagcgtttcaccggaaaaaccggaaacggataaccccggctgtgcaagcaggagacaagcgccgctgtcctcaagcatatatcgcagcctgtcctcaggatactccgggtcaagcggcacgtaggcgccgcccgcttttaacacggcaagcactgaaaccgccatctccggcgagcgttcagcgagtacgccgaccatgctttctttgcggacgcctttttgtcggagccggacggcgagcctgtccgtgtactggtcaagctcagcgtacgtcagcataccgcccggaaaacggagcgccggacgatgcggcgaaagcgcggcgcggcgggcaaacagcccgtgaagcgtcggagccggcggttcaaccgcttctgtatggttaaatgcatccatcatacttctggcttcacacgcatccagcaatgcgatctcggaagcgccgatttcagggtcggaaatgactgagttcaccatatgccgtaaaaatgtttcgatattcttcataaaaacatcgtcgtatataccggtatcaaattttaagcggatataaagagaattgcccggaatcacctttatgctgcatccgtagtttgtgacttcttccatcgtaaaatcctctaccgcaaaatcaaatgaaccggcctgactcacattttcaatttcacgctgggccggcacattttcaaacacgataatgtggtcaaacagcgcttgcttcagagggctttgcgcctgaatgtcatacagcggataatagctgtacgcttctgcttgcagcgtctcctgctgcaaatgcctgacaagctccagaaaagaaaatgaaccgcttttcacccgtacgggaatcgtattgataaacagtcccaccattttttccacgcctgcgagatccgacggccggccggaaacgacagaaccgaaaacggcatcatcacagcggctgacacgctgcagcaaaatgccccacagtgcctggaacactgtattcagcgttgctcccgcccttgccgcaatgttcttcagctcatttgtctgctcttcagaaatggtgaaaaccgcctgctcaagttcgccgtttggttccgcggattttttcggaagagacgccgtttgctcaagatcggcaagtctcgttttccaaaaaatctcggcttctttacgatcctgcttcatgagccatttaatatacttcccatatggctgaacgggctcgaggaacggaagccgttcgtctccgagagattgatagatcatcagaaattccttcatgacaattccgaagcaccagccatccatgacaatatgatgatggctccatatacaaacatagcgttcaggcgcttttttcaaaatggagactctcatgagagggtctgattgcaaatcaaagcctttatctttatcttcttttctaaaccggtcggcatatttgtcttgtgccttctcgtccaaatgagaaatatcatgaaactgaacgcggctcggcctgtttttcaacacgacttggcggggctttgccacattcttgtgaataaatgtcgtacggaaaatatcgtatcgttcaaaaacagtgtctatacttttttggaaccgttcccggtcaagctgtccgctgatcgtaaacaccgcttgttcgaagtaggctcttgagtcatgatccaacagagaatgaaaaagcatgccctcctgcataaaagacaaaggatatatatcttgtatttccggttgctgccccattgcgccactccttttctatagtttgttgacggctcccataatgtcactcagatcttccagcgttaactcctcgtcactgaaatcagcggcgctccattcacgctcctctttgcctgtgcaatgcgtgataatctgcttgagaaaggtatgaaaatatcccgtcaaaacttcaatcgtttctttttgatactgaaaacggttgtacacgacatgcatgctgagacattccgacgatacggagccgctgatatcaagtgtgtacggacgttcccagtctgggctgacttcatttcccgcttttacgggagaaacaccgaagccgctggaacggatttcccggtcaaactgtcccagatagttaaaactgatttcaggagaatcagattcagtctctccccagagtttgcttatatatttcagcaccccgtatcccgctcctttatgcggtatgcggcgcatcatgtcttttgtccgcttaatgtgatagccgagacgctcgccgtcatcaggctgatcttgaaaacttgcgtcaaccaataccggataaattgacgtaaaccagccgatggttctgctgatatcaagatgctccaggtgctcttcccttccgtggccttccatgctgattttgaatgtctcgtttccggtccatctgttcagcgctaggcttaacgcggcaagcaataattcgcccgtctctgttgtgtatgctctgttcgcttccgttaacagctgctcggtctcctgttttgtcaatgtaacggtcatcacatctgtatctttcagaagattggaagagatgcgggcatctttcggaagcggtttgaccgccgctttttctctttcggaccagtagtctgcttcctgtaacagccggcggctttttgcataatcagagatttgcttcgcgtaagtctgataggaatcggtttttgccggaagcgcggcttcttttccttcgagcgcctgcctgtagcacgcggtgagatcttcaaataaaatccgccatgacactccgtcaatgacaaggtgatgaatggaaagcagcagatgatcgccatcattagcgtgaaataaaccgacagctacgagcggacccgtctccagccgaatggaagtttgaatgcgggcggccgcctgttcaattgcggcgtgttcctcttgtaataaccctttccctctcacgtcatgcgtttcaaatgtaaagagttcttcttcagaaaggttatccgctctgttatattgaatcactgatccgttttgcgtgccgcataccatccgtaatgcgtcatgatgaaccgcgagctgtgccagcgcttttctcatagcagattcattgatcctgtccgcactgctgagcataacggactgattaaaatgatcatgcggcaatgattgcgaaaagaaccagtgctggatcggcgtcagcggcacgtctcccgtgacgggagcctgatcaatcacgcggcggactttccggagccgcatcgagacttctcccagtgtctgatgctcgaacagctcgcggacggtcgtttcatagccctgctgtttcagcctcgcacatacttgcagcgctttaatcgaatccccgccgagatggaagaaatgagcattggggccgagtccttcaacacctaagagttcttcccagatgtcagccatcatttcttcagtttcatttctcaggctgatatcatctccaaggctttcatttaattcaggctgcgggagcgccttctcgtccagcttcccattcgccgtcaaaggcagttcatcaagctctatcaagcgggcgggaatcatatattccggcagaaaagctctgagagaggcctgaacctctgcttcttttattttttcattcccgtgtaagaccgcgtatgcgtaaatggagtgctgaccgtgctgatcagcacgtgtgatcacggcggcctctttcacgaaggaaagctcctgcagcgctgattttatttctcccagctcaattctgtggcctctgacttttacttgcgcatctttccgcccgacatattccagctcgccatttgagagtcttttggcaatatcgcccgtccggtagagccgcatgccggtaatgtgcggattcgtgatgaaccgggaggcggttaaatcatccctgtttacatatcccctcgcgacgccttccccgccgatataaagctcacctggaattccgatcggctgcggattcatataggcgtccatgacaaaagcatggagggtttccagcggtctgccgatattgcttttatttctctcaatatcatccatattcagttttttgcatgtgacgtgaaccgtggtttccgtaatgccgtacatattaacaagctctgtctccgggtacttctctttccagcttttcagcatgccgggctggagcgcttctccgccgaaaatgacatatcgaagcttcagcttgtccgcatgcccggcttcttcatgaatgagtccggaaaaagccgtcggcgtttggttcagcaccgttacgccttcactttgcagcagctgccggtacaaatgcggatcacgggcagtttctttcggcacgataactacctttccgccgtataagagcgcgccgaatatttcccagacagaaaaatcaaagcaataggagtggaacagggtccagacgtctccagtgccgaaatcaaacggcagtcctttatgtgtgataaggctgatgacattgcggtgctccgtcataacgcctttcggttttccggttgtgcccgatgtgtaaatcacgtaagccggctgttcaggcgttatcatttctttcgttctgtctgctgaaacggattcaggcttatcgatgtataaaaccggcagcccgtccattccggatatcccaagacccgattgcgtcaacagaacacgcgcgccgctgtcagtcagcataaatgaaatccgctcgtcaggatagtcaggatcaatcggcagataagctcctcccgcttttaaaataccgaaaatcccgatcagcatttcaggagatcgttcggtcataattccgacaatctgtccggagcggatgccgttttccgacagcatatcggcgattcgatccgccttttcattgagctcgcggtaggtgagacgctcatcggacataacggctgcaatttgatccggcattttttccgcctgtgcctcaaataaactgacgatcgtctcatgcctcggatactcagctgtttgattttccgcttgaagaagcatctgccgctcatttgtgtccagcaaatgaatgtcagacagcttccgctcatcatccgatgcgatttgtcctaaaagctctttaaaatgaccggcccaccgttcgatcgtacctttttcaaacaacgcggtactgtattcaaaatgaaaatccagtgagccgtccggccgttcctcggcatgaagcgtcaagtcgaattttgaaatgtcatgtttcactgcatgtgaagaaacggataagcccggaaggttcactttgaaatcatcactgttttgcaaaacgagcatggcatcaaacagcggattgcgattgacttcccggtgtgtatcaagcttttgggcaagttcttcaaacgggaagtcctgatgttcggctgcgccgagggcgagcattttcacctcttctaaataagcgcggaatgttttatcccctttcggcctgcttctcattgccacggtatttacaaacatgccgatgaccccatcaagctcagcgcggcttctgccggccgcaggtgaaccgacgacaatgtcctcctgcccgctcaatttagaaaggaacaaggagtagcctgccaaaagaatcatatacagtgtcgaacccgtctcatccatgagccggcgcaaattctccgccgtttctttttgtaggcgcgttcgaacaacggacccgctgaaatcaggaagctgcgggcgctttttatcgagcggcagatcaagaaggggaatattttccccgatcgcatccagccaataccgctcatgtcttttgaattcttcagcggcgaaccgctcatgctgccagacggaaaaatctttgtactgaagttttaacggccgcagctcttttcctctgtacaaatccgtcaattcttggatcagaacgctcattgacacaccgtctgcaataagatgatgcatatcaagcagcagaaaatgacgttcttcagtggctttggctaaagtcactctcaaaagcggcgctttttccacgtcaaacggtttgacgaaagtttccatcgcctcttgaagaagtgtcccggatggcatgtgaatctctgtgagatcgagatcgacatgtgaatgtacgtgctgcatcggctccccgtttcgtaaaacaaatgatgtccgtaacgcttcatgcctttgtaacagcgctgaaaaggcttcgtgcagacgatcacggttgagtctgccgctcagttccagacaagcgggcatatgatagcccgtactgtccgccgcaagctgatgaagggcataaagccttttttgcgcaaaagatagcgggtacaagtcctttgcctccgcaggcgtgatttctgcatattctcctcttttcctctgttctaggaagcgggccatgctctcgatggtcggatgttcaaaaacatggcggacggcaagttcaatttgcagccgtttatgtatctttgaaacaagcgacgcggctttcagcgactgtccgccgatttggaagaaatcatctctcatactgatgtgttcccgtttcagcacttcttgccaaatagacagcagctcagtctcaagcattgtgcgcggagcttgataatcaccggttctctcggcttctttcggctcaggaagtgcggcccggtcaagttttccgctcacagacagcggcatttccgtcaatttggtaaagcttcccgggatcatataagcaggtaatctcccggccaattcggcatgaggatcaaatgtcacacccgcgttttccagtacggcataagctgcaagctcctgttccccgtccgccgttttgcgcacgatgactgccgcctcttttaccccggacagacttctgagtgccgtttcgatttctcctaattcaattctgtaacctcttaccttcacctgatcgtcaaagcgtcccatatattcaatcgttccgtccggtaaaaatcgggctgcatctcccgttctgtacagccgttcacctttacgaaacggatgaggggtaaagactttgtccgtcagctctttttgctgaaaatatccgtccgccagaccttttccggaaatacacagttcaccgacggctccgaccggttgcagccgatctccgtgcatcatatagacagaagtgttggcaatcgggcgcccgatcgtaatccggctgcttttttgcaggttgcgcagaatcgtcgtggccacactgttttccgtcgggccgtattcattcagcagctcggcattcgggcatatgttgcggctcgcttccacgatatcaggagtggccgcttccccggcaaatgtcaccgcccgaagcgtctgcgcatcctttttcgtcagcgaatcaagcagaacgcgatacagagacggaacgatcagaagatggcttaccccgtggcgggcgattttctgttttattgaaaggacgtctttcgcatcatcttcatcagttaacagtacacaggcgcccgacagaagcggagtgaaaagactcgttaatgacccgtcaaatacgtatgaaaaaagatgaagcgctatgtctccttctgtcatcccgtattcttcacgccgccattgcaatgtattgctgatcgctttgtgttgtacaagcacccctttcggccggcctgtcgttccggaagtgtaaatgacatacgcccaatttccgctgtcagacaccggcggaagcggtgcagtctgctgggaaaccgtttcctccatgatgacgacgctccccttgaaatgcggcggaatgagggggagcaggtctttttcagtcaggagcagtgaggcttcactgtctctcagtaaaaatgaaatccgttcaggcggaaattccgcatcaatcggcatataggcgctgcccgacttccaaattccgagcagagcggcaaccgtactcattgatcggcgcagcataacagcggtgatctgatctgaacgggcgcctttttcccttaacgcatgggcaatctgatttgcccgctgatttaatttcttgtagctccagcttaccccgttatatctcaacgcctcttggtcaggcgtttttgccgcctgttcttcaaacagcccatgaacggttgtctcagggtacggacggttcgtttcgttaaacgaatgaatcagggcttcttcctccggtggtacgagactgatgcttgataaaagcctgtccggatcttccgttacacaggagatgacctctagaatatgccctttgatccgtttcatgtcttcccgatcgtagatgcccgcattgtagctgaatttcacataaaactcttctcccggaacgatgacgacgttaagatcgtaattggtttcctccgccatcgaaaagttttcaagtgagagcgcatggctttccgtttgctgccagccgtttaccgcagcctgcatctgaaccggataattttcaaaaaccaggatgtgattcaagagatctttttgcaggccgctctcgttttgaatgtcataaagcggataatagctgtgctcttccgcagcgagtgactctttttgcacctttttgagaagagaagaaaaagtcatatcaccagccgcgcgcacccttaccggcacggtattgataaacagtccggccatggattcaatgccgctgatagctgaaggcctgccggaaacaaccgaaccgaagacggcatcttcagtcccgttgtaacgatggagaagcagaccccaaatgcccgtaaatatagtattcagcgtgaccccgatgcctcgggcaatgtctgtcagtttttgtacggtttcaggctcaagggaaaattggaaatgctcagatgcataaccgttttgcgccgtcttattcttcgtttgcggaacggaaacggtttctccgtaatcttccaagcagcgcgaccagaatgctgacgtttcttctttattccggcttcggagccatttgatataagtgctgtaaggagccggactgccgaggtttacaggccgcccgctccggatcgcataatacatgctgaagaaatctttcagtacaaggcccaagctccagccgtccatcataatgtgatgatgagtccaaacgcacgtatggcggttttctcccgtttgaaaaagagtcaggcgcattaaggggcctttttgcagatcaaaccccttatgccggtcggtttccttgaatttgtcaatgatgctttgctgccgttcttccgaataatctgaaatgtcttcagtccgtacggcagtgtcacggcgtgaaaggacaacctgctgcggcccttcaaggtcaggcacttcttttatgaaaatcgttctgaaaatatcataacggctgacaagcatatccagacttttttggaatgtatcaatgcataaatccccgctgactgtaaacgaaatctgctcaacatatgcgtttgatccggaatccagaagcgaatgaaacagcatgccttcctgcatatatgataaagggtaaatatcttgaatttctgtcgcttgtgtcacgaatgccacacacctttttatgaaattaaagtccttttacgagatcttcaatgcttgatagggcttgagcggtcaattctgtatggctgtaatccgttaatgttttttcccgctctttcttgccggaacagtgggcgatgatgtccccgaggtgagtatggaaacgattcatgaagaactcgattgcccccggtgcaaatacatcggtataaacggcttttacctccagttgcccggccgccaccatcgcgttaatatccagatcaaactcgcggatgcgcccggccgctatatcatgctgcggcttgaacggtgacatcttcagcgtcccctcaagaccgtcaaacgcaccgagatagttaaagcttatttctgggtctttataaagaatgtttcgcgaatatctcagcagcccgtagccggttccgtgatgaggaacccgtctcatcatgtcttttaccgtctttatgcggtgcgcggttgtttcccctgagccgtccggcactctcatatccaaaagcaccgggtaaacagatgtaaaccagcccgccgttcttgacatatcaatgtcaggaatatgcccctggcgtccgtgtccttcagtgctgataaggatctgttcggaacccgtccactcatgaagcgtcattccaagcgccgttaaaagcaattcatgaacatccgttccgtacgcctgctgtgtttccatcagcagctgcttcgtgacttcgctgcttaatatccatgatgcagtgcgcgcgttttcctgcaatcgtccggcgttttcatcagttattttcggcagcggcgctgtttcaccagacatcacgctgtcccagtatgcggcttcctccagcaatgctttgctcttggaaatgtcaaaaagctcttcggcatactttatataagaatcgcttttcggcggcagttcgatttgtttgccgtccaatgcctgctgatatgctgtctgcagatcttcaagcaatattctccacgacacgccgtccgtgataaggtgatgaatcgtgatgagcagatggtcggcttctttcagcctgaacactccgagatgaagcagagggccttgatcaaggcgcatagcctgctgtatttctttttcctcagcggctatccgtttttccggctgtgtttcttctgaaagatctatgacgttaagcgtaaagatttcttcatgctgctctgtgattccgcggttatattgaacaacttccccatgctcattttcagtgaaagtcattcgcagcgcatcatgatgttctgtcagcgcgcaaaccgcctgatacagcgcatctatttcgaggctgtcttcactgcacagcatgactgattggttataatgaagctcaaacgcacccggctcctcaaaaaatctctgctggatcggtgtcagcggagcgcttccttctatcgggccctgatcagccgttgcaacagccggcgtgaggtgcttcgcgagttctgcaatcgtcgggaactgaaacaaatcgcggatcgacatgttccagccttctccggcgagtcgggctgacacttgaagcgccttaatggaatctcccccaagctcaaagaaagagtgatgaattcccgctttctgaatatgaagcacatcttcccaaatccggcataacatcgcctgtttttcatcgccgggcgcgacaaatgcctgtgatgaatgtatctcttctgccggcaatgccgatttatcaagtttgccgttcagtgtaaggggcatgctgtctaaaccgataatatgagacggcatcatataagccgggagctcctgcataagagactggcggagtgatgagatatcggcctctttaggaacgacgtatgccgctaatcgtgcttgtccttcggcatctttcatcacggtaacagccgcttctttgacttgatcgtgtttcaaaagcacactttctatttctcccgtctcaattctgtagcctctgatcttcacctgcttatcgatccgccctttaaaacgaagagttccatccggcagccagcaagcctgatctccggttctgtaaagcgtttctcccgtttgtaacgggtcactgaatgcgtcctctgtcagctcaggctgtccccaatatcctttggcgacgccggcgcctccgatatacagctctccgaaaacgccgatcggctggacctgtttgtctttgtttaagacgtacatttgcacattcggaagcggaacaccgatcggcacatcatcttcccgcggctcttcgctcatttcggcttcataatacgaagagtcaattgtcgcttctgttacaccgtagctgttaatgatccgcatttctttcccaaagcgttcatgaagcgtataaaaatcttgcgacttgatcatatctgaaccaagtaccagtatttttacgctttgcagcgcgagtttccggcggtatatatattccataaacggaacaatcagcgcgggtgtcgactccataaacgtgatacggtgctgatcaatgagccgataaagctgctgcggctcaagccggacgtcatccggacaaatgacaagcgttcccccgtttagcagggcgcgtgctagatcccctgaaaatacatcaaatgagaaactcgccatctgcagcactctgaccggtataagatcaagctcataaatcctgcgccatgcaagtgctgcatgcgtaaagctgcgatttctgacttcgactcccttcggcgttcccgttgttcccgaagtatatatgatatatgcggtatcatccggtgacgctgtcggctgaatattctttgcggaaatatcgtattgatcttcatgatcaagctgaatgagaaataaattgtgatccgtcagctgtgaagcaagttctttgtattctgactgcaccatcaagacggatgccgcgctgtcttttaataaatagcgaatccgttcctcaggataatgggagtcaaccggtatatacgctcctcctgatttcatgaccgcaagaacactgacgatcgcttcaatcgaacggtttgctaatatggctgctctttttcccggaccgaatccatttttctgcagtgttcgggcaagacggtttgcccgctcattgagctggaaatagctgatctgttgtgctccttcaataacagcggtctgatgaggcgtttcttctgctttctcttcaaacagctggtgaaacagtttgtgtttttccatgaattcggtttgtgtgttattaaactcaatcagtaacttttgtttttcttcttcatccaaaatgtcagctttcgatagtgtgacttccggttcggcggcaacatggcgcaagagattcagtaagtggcccatccagcgttcaatcgtttctttcataaaaagctcggtgctgaattccatctcaaagcggatgtttccatcggattcagccgctgataaggtcaggtcaaaacttgatacatcatgttcggtatgctttgatcgtgacgccttcagaccggccagatttatctcctcccgctccatattctgaagaataaacatcacatcaaacagcggattgcggctcatgtcccgctgcacgccgagccgctccacaagctcttcaaacgggtagtcctgatgttcatacgcctcaagcgccgcctggcggacttccgccaaataatcggtgaaccgtttgtcccccttcggctccgttctgatggcaagcgtgttgacgaacatcccgagaatcggttcaaggtctttgtgcgggcgcccggcaatcggcgatccgacgatgatgtcttcctgcccgctcaatcgcgcgagcagcgtattgtacgcggcgagaagcaccatatacaaagtggagccgtgatcccgggcgatgcggtgaaggccggatgccgtgtcagcgtcaagcgtgcacgatacgctgccgcccgcaaagcttctgaccgccggacggggcttgtcagccggaagttcaagcaccggaagctctccttcaagccgcttcagccaataggcttcctgcttctgatatccttctttctcctgaaacgaccgctgccagacggcatagtctttatattgaaggcgcatcggcgcaagcgaacggcctgcgtacagctcgccgaattcttttatcaaggtgttgacggacacaccgtcagaaataatatgatgcatatccgttaataaaagatggtgttcttccgattctttcacgagggccgcacggaagagcggcgcttcctccagacaaaacggccggacgaatgcgtcagctgactcggcctcatcgagctgaaacggcacgctgtcatggatgcgctgcaccggttcgccgtcaggccccgtttcaaaggacgttctgagcgactcgtgccgctccacaagctgccggaacgtctcctccagccggacacggtcaagcgggcccgtcagttccagcacagccggcatattgtagccgacaccgccgtcttcaagctgttggagcacatacatccgtttctgcgctgaagacaccgggtaggtatcttgtgtttgcgcaggctgaatcgcttcatacgagctttcttccaagtcctgaataaccgaagcgagctcttccaccgtcggccgggcgaagatgtcctgtaacggcacctgaacaccgaactctttggcgatgcgggagacgagagccgtcgcttttaacgaatggccgccccgctcaaaaaagtgatcccggatgccgacggggccgtttttcagcacctcttcccaaagggcgcaaagcttcatttccgtgacgttccgcggggcagtgtacgcctgtctgtctgccgatccgccgggagccggcagcgcgcggcggtcaagctttccgcttggcgtgaccggccattcgctcatctctataaactgagccggcatcatgtaggccggaaggcgtgtcgcaagctccgcccgcacgtcatcgctttttcgtccttcaatataggcgtaaagcgcggtttcgccgtgttcggtccgggcggtgaccgccgcctcacgaatgccgtcgatgtgccggatcgccgcttcgatttcccccggttcaatccggtagccgcggactttcacctgtccgtctgaacgaccgagccattcgacaaggccgtcttctgtccagcgtgcgatatcgcccgtctgatacatgcgttctcccggataaaacggatcaacgacaaagcgctcctccgtcagctcagggcggttcagatagcccgggccacgccggtccccgcgatgtacagctctcctgccacgcccgcaggctggatggttcctccgctatctaatacatacagacgggcacccggaacgggttttccgatcggaagccttgtccgtccgctgtcccgttttcggtcacagacgtaaaacgccgcatcaaccgtcgcttccgtcggtccatagccgtgaataagcatggtctccggcagaagatcggcaaaccgggcagccgtaagcggggaaagagcttcccctccggcgaacacgcgtgtcagtgttctgccgaggcgtgttcttgtttccgcaggctctgtttccagcgcgtctaaaaagctgttgaccatcgccggaataaaatgcgcggtcgtcaccttttctgaggcaaacgcttcaatcatccgcacaggatctttctcccagccggccggaagcagatacacggaggcgccggacatcgtccaccaaaacaattgccagatggaggcgtcgaatgaaaaggatgatttcagcacgataatatcctcttccgttaacggaaactgcccttgcatccctgataaaaaggcggcggcttgacggtgttcaacagccactcccttcggtgttcccgtcgaaccggacgtataaatgatataagcgagcgaatcagcatccgcttcttcagagacagcccctgtctccgtctcatttgtcagagaagaaagagacacttctagcgtttcaccggaaaaaccggaaacggataaccccggctgtgcaagcaggagacaagcgccgctgtcctcaagcatatatcgcagcctgtcctcaggatactccgggtcaagcggcacgtaggcgccgcccgcttttaacacggcaagcactgaaaccgccatctccggcgagcgttcagcgagtacgccgaccatgctttctttgcggatgcctttttggcggagccgaacggcgagcctgtctgtgtactggtcaagctcagcgtacgtcagcataccgcccggaaaacggagcgccggacgatgcggcgaaagcgcggcgcggcgggcaaacagcccgtgaagcgtcggggccggcggttcagccgtttctgtatggttaaacgcagttaacacccgtttcttttctttttcatccgccatatcaatatgccgaatcagccggtttggatttctaacggcattttcaacgatcgtcagcaaatgagtttgaattcgtttaatcgatgttttagtaaataaagcggattgataatcaaaattcagctcaatcaatcccgtatctgtccgctccttaattaaaatggacagctcatttgccgtatgcccgctgaaaaacatcgccgtttcataatcgaaaccttctgcctgacgccacgcgagaggctggtattgcatcgaaatcccgatgatattttgcaggtcgtgatgaatctgccttaattcattgacaaaaagattgtaaggatatttctggtgccgcataacagacagctgctgttttcctacactgcggacaaaagacacgaactccgcatccggatctgccgtcattctgatcggtagcgtgctgacgaacatgccgagcatatccttttcgagcttggaaccgcggtttccgtaataagtaccgatggcaatatcctttttagccgtcagacggctgatgcatatgtataacgaagccataaacagagagatgatgctgacattatgatctttgcaaaaacgccggattgattgttctaaggagtgggaaagagtgattgtatctcttgaagctgcagtgctttgtctaagatgagaggttcgttccgccagtgaaaggtgttccggaacggttcggtatgtttcagtccaaaatgaacggtctttttgaaaacgggaagactgtaggtattgctgttctttttccatgtagctgagataggaagggctttggtgttcggccaaatcctcgcttcgcatgattttttggtagatttcaatgagctgattgccaagcagattgagcgagatgccgtccataataatatggtgaaattttgaataaagccaaacttcttcgtctgacatgacaagcagagtaaaatgatacagcggtgaatgaaacagcttgaacggaacacgcgtctgtttgtcaatccatgcatcccgctctgattgatcaatatgagtaaaatcaacggtctctaaagaaatcggccgatgcccggccagatacagctggggttctgagccgtccccttccgtcagttgaaacctgagcgaatcattttgcaagatagagaaatctaaagcacggcgcaatacgtcaaagtcgatattccccctgaatttgacgcacgccgcaagattgcagatacttgtgcccggctcgagcagctctgtaaaccagactcttctttgggcgtgagttaaagaataaacagtgttcttcaatggaatccctccatttcaatttaagaggataagaaagtgaaataattacaattaaatttcgacagcatatgactaaatcatccatataagcattattttaaaacatattttagaaatcacaataaaaaattaaattttttctaacattttttagaatatagtatatattcctcacttcacttcttcatttctataatttttataccatgtaaaacagtatgtatgtacactgcaaactggttctaaaacactataataaggaataaaatgtataattaattgcgcttttaaaaaggttttgctttccgaaaagaaattttatgataaaaaatgaaaaatcagtgaacaagtaagaaagtatcatgtaaaaaaaaggaagaatgttgccgatattactttttgaaaagattgattcataatcgcaatataatgttttacagacatcaaaaaagccgaaccctctaaggatccggcccttcttattgatttgccagcacgactgcgattttgtcttcaatgtcttttccgtcatcttcgtcaagcagcccgttttgaagcacggaaaaaataagcgtatctcctgtttttgtgtctgcatagccggcaatcgaactgactgatgttagtgacccggtttttgctttaattttgccctctgccggagtattcttcagccggttccgaagagtgcctcccgtcattctgtcgcttgcaccggcgacagggagcgaacgaaggaaagccgggtaccacttctctttctgaaccgcatacaaaagctctccgatttggccggcggatacgccgttaatatgagaaacgccggatccgtctcttgcaatcaattcatccggattgagcccgaacgatttgagctccgatttcatcacgtccaagcccttttcccagctgccctccccttttttcacttttcccatttccttgatcagaatttcggcgtgcccgttgttgctcagtttcataaacgggatcaataattctgaaagaggcatggatgtccgtgatgtgacaagctgggtgcggtgcggcattcggcctgttctgattttcccttttacagttacaccctgtttagtaagcgcttgtttccataaatctaaagcataggacgacggatcccacactgccgcccattctcttgcctttgccgagccggcaggtatggctccctttatcgtaatcacattgccaccgtgctcccgttcaaccgtcaattctttcttttcatcagaagcgacggtttttacttcatttttcacacgaacgatgtccgtatagggagaaattgaaatgcgcggctttttatcgggctgtttcgccgggctgatttccgcaatcaccgttccggtatcataatcctcatttggggaagcggtaagagctgatacttgcgcgccataatattggccttcatcactccacggaagatcaactgaatacctggtatcgtcataccacgaatcatccccgaccagatctcctttaatgacatggatgcctctggctttgacctgtttagccatcttctcaaaatcagaagccaatagggtcggatcgccttttcccctgagataaaggtttccgcgcagctgttttcctttcacggcgccgtctgcccgtacttctgtcttaaaggtgtaatcttctccgagaacggaaagcgccgcagatgccgtcagcagtttcatcaatgatgcaggcctcagccgcatatcttcccggctgccgaacagcacctcccctgtttttgctgaccggacaatgatgcccgctgaagccccctttaaagcgggttcttcatccagaatgtgttccagctctttttgcaaagtatttttttgttcagccgccttagccgcatcatcaatataaggaacttcggcaatgatcaaaagcagaatcaccgcgcacaagcgtttcacatatgttttcaatgttatcccgcctctttcctattcttcgtcatgcaaaatggtgatcccggatgacgcagccgcttcttcgcccggtttcagaatctgaagccctgtcagtgatgcaggctgattcagattaaatgcatctgtaacggaagtataaggctcaagactgacaaacccctgctttccgtcaccgttatataccacccaatgcttgaaagacgtgtctgcctgatacaaaacggataatttctcattcggatgataaataacagcttcgttattgccgccattccgtccggaagaaagaaaaacatcgtcaaactgtttatttttcaaagacatcccatgacggaacgcttctttatcaggaacatccaataaacggcccgtcggtacgaaacgttcatttaattcccacatgcggtcagccgtcaaaaatagacgggattgctcttcattgaaaacaaatgtggaatgatagcctagcccccaaggaaaagcctccgttcccttattcataatcagcgcccgctgcgtaaacacattgtcttttaatgtataggtcatccggacaatgacatcgtgcggaaattgtttatgaacacggggaatctttgaaagatcaatttctgtttcgactgtcattccatccccctcttctttcgctgctgccgctttccaatgctgattgtgaagaaagccgtgaatatgattatgtttatcctcttcgtttatctcgaattgatacgagcggccgtcaaaacgaaacgtcccgtccgtaatccggttcggcgggaataaaacgggaatgccgtacagcatcggttttttgaggaattcctccgcagtttccggttctctcagaagccgcataccggttcttttatcccgaagcgatatgacatttgatccccactccggcacaatgatgcattcagcctgatcagtctccgcctttatggctgaaactcctaaataagtcgtatgttcaatcgtcataagcacctgccctttccttgttttctagcatgtataggaattccattttctaaactcattttccttctctaaaaaaaacatcgcccgtatgaactgagcgatgtgcggtaaaaccttattgaatcagccgggtaatctgttttttcttccatacaaaccggtaatatccgtattgcagcagcaggctgacgacaaaagccgccggataaccgacccaaatgccgagaatgccgagattcgtataatgagaaagaataaaggccacaggcacttcaattccccaaatcgtaaaaatgctgataatcgtcggccataacaccgtaccgctcgcccgcattgttgctgaaacaatctgagcgtgaccgaaaatcagatagctccaaagggtaatcataatcagattgcgggcaatgcggagtgtatcctgatcggttaaaaacaaagccagtatctgccgggagaaggtgtaaatcagcacaatcaaaaccccgccgatcaaataattcaggccgatgccgactttgatgacctgcttcagccggccgaattgattggcgccaatggattgggcggcaaaaattgaaacggcgataccgaggcttaccgccggcatctgcacataactcgccacttggttgacgaccccgtaagcagccgtcgcgtttgatccgtaatgattgacaaatgaaatgaccgcaatttcagaaagtgatacgagaatcatattgatgcttgacggaataccgagacggagtaaaagcgcgagcagctttttgtccattttaagagaacggagcgcagtccggtcaaatgccaatggatgtttccttttccgcaaataaaccatgagtacgataaatgtcacgatgtttgaaatcacggttgcatacgccgaaccgtaaatgccgaacttcggaagtccgaaaagcccgagaatcaataagggcaagagaccgatgtttatgactgtactgacgattaacgtataaaacggagtctttgaatctcccgttccgcgtaaaaatgtcgtatacgcaaaatataaaaacatcagcggcattgcgcaaaacaaaatacgcgcatatcggacactgacatctattacgttttccggcgttcccatcagccgcagaatatcaagcgtaaacacactgccgacaactgccagaacaacaccgagcataaaggtaaaagtcagtgtagtgccgacaatcgccttcatcctctcttcgtttttcgcgccgtaagcctgcccgatcagaatggaacttcccgaaccgattccgatcgtaaaggagatcagcagaaaaaacagcggaaaaaaagacgatacggcggcaagcgcatcaactccgagccaccttccgacaaataccattccgaccaattggccgacagattgcaatacattgcttaaaagcagcggcactaaaaacagtgacatcgatcgccagacagactggccgcggccttccgctgtttctaaatgatcttgtacttccatatgtaggactccttttttgattttcttccattttattattcagcagacagcttgtaaaaaccttttgttcaatgaaactctttatcttattctcacgtcttacatggaaataaaccataaaaataaaaagtccggaaaatatttctgaaaaggtattgtaatcttatcgtaattattgtaacatttgtaacataagagaaagagattgattgaaggagagattatatcatgaaaaaatggctattattcctcactactattacattgattctgtcattgggcactgcggcgaccgcaaaaaatgcacctaatgaccttacacaaaaacaagcacttcagctggccctgtcagcgagagaacatttctggaacacgatgagcggcggtgcgcttaaatcaaacgcaaactgcacatctgaaccgtttgaatatcaaaatcttcaatacgtctttatgtgcaaagacctcggaacaaaagcgaaagccgtaaaatatctgacacccgcttttacaaagcaagcgattgacaaagggctcaaagattaccacttcactgtaaaagacggcaaattggctgttccgctcggcgacggagataacctcctgaattggaaaaaagcaaaaatgactcttctttctaaaaaaggaagcgttcaaacataccgcttcactgtaccgactcttgacggttcaccgtcagcaaaacgcgatgtaacattcgtaaaagaaaacaacgtttggaaagtcaatcaatttgatgctgtcatataagaaaaagcccgcttgcttacagcgggcttttttcacatcatttccaccaggttcttgcaaaatattaaactcaaaaaccccttgtataacaaggggttttctgtcttgccgacattattaatccgcacctatcttatgtcgaaaacgctctaggagagattcgaactcccgacctgcagtttaggaaactgctgcactatccgctgtgctactagagcctgcttctattatagtaacgctggcggccgtttttttcaagcctacagccctccgaacactttataggcggctctcgtcgtatcttcatctattccgatataacgcattgtaatagacggagaagaatgattcaaaatcctctgcagttcagcaatgtcttttgtcctctgataaaaatgatacccgaacgtctttctaagcgtatgcgtcccgatttcctccaatccgcacgcggcagctgcttcctttaatattctgtatgcctgaatccgggaaatgggcttattcgtccgtttcgatttaaacaaatagtcatcctctttcatgtcttttgtataagcgtatatgtcggccttcaaagactccagtatcagaatttttcttttctttctcgttttgctttcggttgcccacacatggtctttgttccttacatccctcacgcgaagcggcagaacatcagaaatccgcagtgcgctgttcatgccgaaaataaataaaaaataatcacgatcacttttcttcattaaatactgtttgacttcctggatcttctccaaacttcggatcggctgtacgatatgcatcaaaaaaccccttataattggtaaagtaacatattgagcattatgttactattatagccgaaacctgttgaatgataaaggataaagggccttatgtaacataatatacatagtgttacataaggggaataaggcacgcagtttcatcgaagtcttcaaaacatcattttcgacccgatgacgggattttaaatcaacagagactcacggtattaaaaaagaaaaacaacgcccttaaaacgaaatctgagcattcgtttttttgtgagcaaccgaaaaaaatgaaaaaaaaagacacaatatgaaattgtgtcctagtcttcatcttttacatcaatgtcttcaggaagcggctcatttaaaaactcttgaatcatttccttatatttttccagctgttcgagatgggtttgaaattgttccttgttgattaaatattgctgtccgtcatgtacggcccttattttattcgtcaaaacaagattgtgcacatattcttcaggaagactggtaaactcagctgtctctttgatcgttaaatacatggctcacgttcctttcatatgtcatgtgagtgaattctgttttgtttattgtagcttattttttgtctttatgcttgtttcacagctttttctgcccggtttcccatttagcctatttgcgactgattacattcacacagaaactccggctttttgcgcaccggactattccgtttgtcacttgtgaaaacagcacattttacttactctataattgtaagcggaaaacaaaggaggcagactatgaaaaagaaaaagtttatgaatctctgttttatcgttctgctcagtactttgctcacggccggaagcatcccttatcacgctcaggctaagaaacacccgttttcctatgacgactacaaacaggtagatgtcggcaaagacggcatggttgccaccgcccatcctctcgcttcacaaatcggtgccgacgtgctgaaaaaaggaggcaatgcaattgacgccgcggtcgccattcaattcgcattaaacgtaactgaacctatgatgtcgggaatcggcggcggcggatttatgatggtttatgatgcgaagacgaaagacaccaccattatcgacagccgggaacgcgcaccggcaggcgcagcaccggatatgttccttgacgaaaacggcaaagccatccctttctccgaacgcgttactaaagggactgcagtcggtgttccgggaacattaaaaggacttgaaaaagcgctcgacaaatggggcacacgctccatgaaacaactcatcaccccttccattaaacttgcctcaaaaggctttccgatcgattcggttttagctgatgccatctcagattataaaaacaaattatcacacaccgctgcaaaagacgtgtttcttccggacggagaacctctgaaagaaggagacacactcatccaaaaagacttagccaaaacatttacagctattaagtacaaaggcacaaaagcattctatgacggtgcattctccaaaaagcttgcggaaacagtgcaggaattcggcggctcaatgacagaaaaagatatcaaaaacttcaatgtgacgattgacgaaccgatctggggggattaccagggctatcatatcgcaactgctcctcctccaagctcgggcggtgttttcctgttgcaaatgctgaaccttctggatgattttaagctttctcaatatgatatccgttcttggcaaaaatatcagcttctcgcagaaacgatgcatttggcttatgctgaccgcgccgcatttgccggggatccagaattcgtcaacgtccctctcaaaggcctcttgaatccagattatatcaatgcccgcagacagctgatagatattgataaagtcaataaaaaaccgaaagccggcgacccttgggcctatcaggaaggttctgcaaactataaacaagtgaagcagccgactgacaaacaagaaggccaaacgacccacttcacggtaaccgaccgcttcggcaatgtcgtatcttatacgacaacgattgaacagctgttcggttccggcattatggttcccggatacggcgttgtgttgaataatgagttaacagacttcgatgcggtgcctggcggcgcaaatgaagtgcagccgaataaacgtccgctcagcagcatgactccgactattttattcaaaaataacgaacctgtcctgactgtcggctctcccggcggagcaacgattatttcttccgtcctgcaaacgatcctgaacaaagtcgagtacggcatggatctgaaagcggcggtcgaagagccgagaatttacacaaacagcatgacatcctatagatatgaaaaaggagtgccggaagaagcccgcacaaaactgaacgaaatggggcataaattcggcagcagcccggttgatatcggtaatgtgcaaagcatcctgatcgatcgtgaaaacggcacctttaccggagttgccgactcaagccgaaacggagccgcaatcggcgtaaacttgaaacaatataaaaaataactaggcaaaaagcctcgtttctcaagctgagaaatgaggcttttgtttattctgcactgtattcagatgagggtttttcagatgttaacgaggcaagtgaaagcacgccgcacatcgcgatgacaacacccgctgatccgatccatgtcactgacgcaagagacagatgagtgacaacaatgcccccgatgcccgccccggccgccatagccagctgcatcacagactggttgaggccaagtaatacacccgatgattcaggctccatcgttgccaaatgatactgctgagcaggtcctgatgaccaggcggcgaaggaccaaaaaataagcactgccgccgctccgaaagcagaatgtgtgacaaacggcaataacatgagcatgatagcatgaagcgccattccgccggttaatgtcatacgcgcccccatttgtcagcactgaaaccgcctgctttagaaccggcaagactagcaacaccgaaaataagcagcaatgtactcagtattccgctgccgatatgagtgacgttcagtaaatacggagaaaggtacgtatacgcaaccgaatagcctccgagccaaaaaaacgtaatagcaagcccgacagccacctttcgtttcttcaaaagagaaaattgctgaataagcggcaccggtttatctccttttatctcaggcaacgcaaaacgtataataagcatggcaatgattccgattgccgcaattccggcgaaaaccaccttccagccaaaagcttcagacacggttcttccgatcggaacaccgataatgagcgccgccgtaaaccccataatgacggtcgcgagagaacttgcctgttttcccgggggagcgatttttgctgcgatcgtaagcgcggtgaccaccacagttcctgctccaagcgccatgatcacccgggctgccgcaaataagccgtatccctgtacaagaaatgaaatgatatttccgattacaaacaatccaagagcatagatcatgagcttccttctgtccagttttgctgtaagggccatcatgacaggcgttccgattgcataaacaagtgaaaaaatcgtaatcagctgccctgctgctgccacagtaactcccaaggaacctgcaattttatcaagcatcccggatatcacatattcagacgtccccactaaaaagctgataattgccaaaatgtaaatcttccaggtattttgcacctgacacactccttcattgataatttatataaagatatattgtgatatatcgatataaagaattgaacaaacagaaacaaatcgcaatatgtcgatgtgtagtcgaaaaaagaaactgaatccctcttctaaaggattcagccctacatttcgcgctgaaaataatcggccatcgcctttatcgcatcttcatctcttttataataggtgtatttgccaatccgttttgtttggataaggcctgcgcgctgaagaatggaaagatattgagacgccgttgactgtgtcatctgaagcttatcggtgatctggctgacacatactccgatctcattcatatcaatgccatcatgcggtgcgaagtgacggtccggctctttcagccattgtaaaatctcaagccgtgactcattagacaacgctttaaaaacatcaataggtttcatacgctttattatatcgtgattttgcgatatgtcaatgttatttttcttgaatctctattttttgttttgtctctcttatgatccgggaaataaaatcactcacattctcttcaaatgtgttttcccgcccgtattgccttacatgtacagaatggtggcggcactcttgatctcccacaaccgccatatacggtatttttttcatttgtgcttctctgattttatagccgagtttttcatcacgctgatcgagctcagcccggatacccgctttctttttgagaaaaaccggaacgaaaaaaaattggcgtacacagctgtcctgttttctcatcttctgttcgataatgtttttaatccattcagcagttcttcaaacgccgatgttaaaaataaatcactccggtagatgaatgatatattcatattccgaaaatgttcaggaagctcatgaagaaaaagatttttcctgttttgaaaataacggacggctgatgcaggcagaaaggagacccccatccccgcctgcaccgccccaataatggcttccaacgtaccgaattcaatgattttatgtgcgggcactgcctcttctttcagtatgttttttattttgcggcggtgcgaacagcccgcggcaaaatacagaatcggctctcgcagcaagtcttgcaaactgccttcccgcttatttgaaaccaagaccaattcttcttgaaatacagcgacttgctcaagatcttcatattcgaccggtccgtaaacaaaagcgccgtccagctcatagtgtagaacgcgctgcactaaggtatgtgtatcaccggttgacagagacagctgtactttcgggtagcggctgcaatactccgtgaaaaattgagggagatggacggctgccgccgtttcaagagaaccgattcgaagcgggccgttcggatcgcctgcctctcgcgctgttttttgcgcctcatgcagcaattgaaggattctgtctgcgtcttttaataagttttcacctgttggcgtcagcgtcattccccgatttgtgcggtaaaaaagctgtgtttgcaattgccgttccagctgctgaatccggtttgtcacatttgattgaacataatgcaggctttctgccgcctttgaaatacttcctttgcgggcgacagcctgaaaaatctttaagtctccgctttccatctaagggcaccttcttgctatgatttttattgatagccggctatcaattttcatttatttactgcagctgatacagcctgtaaaatttttctcatcaatcataaaggagagaagaatcatgaatgtccttatcatacacgaaaatggctttaatttcaggcaggcacctgacaaaaggccgggaaacggcgaagtaaaaataaagctgaaaacagccggattaaaccatcgtgatttgtttttaatgaaaaaacacgaaaccggaaaccatgaatttattctcggttcagacggcgcgggaatcgtaaccgaaataggacacggcgtccggtctcatttactgaatgcagaagtcatcatcaacccggtactgaattggaagactgttgaggacgtaccagccgtccctgatattttaggcggtccgagcgacggaacattttcaccttatgtcatcgttcctgcggaaaatgccgttttaaaacccgaacacctgacttgggaggaagcgggcgtcctgccgttatcagcattaaccgcttatcgcgccttatttacaaaaggacaattaaaaaaaggcgaacaccttatccttccgggcatcggaagcggcgtggcaacatatgccttattaatggcaaaagctatcggagcgacagtcagcgtcacctcccgcagtgaaaacaaaaaacaaaccgcactgtcatacggtgcagaccgggcgattgacagctacggtgactggaatgaggcgctgaatggcgaaaaagcagatatcatacttgacggtgtaggccccgctttatatcaacactatcttgacattattaaaccgaatggccggatcgtaacattcggcgccagttcaggcgatcagctcggatttcccattcgctcgctgttttttccgcagattcatattctcggtacatcaatgggaagcaatgaggaattcgcggatatgctggaattgataaaccgctgcgagctccgtcccattatcgaccgcatgtaccctctcagtgaagcagctcccgcttttaacagaatgcgggaaggacggcagttcggcaatatcggctttcgtatagatgtctaaaaaaaggaacggacccgtccgttcccttatttgtttttaagcgtttccgcttgaaattcaatatgtttttcttcatcgattaaaatctgcccgcaaatcgactgcagacacacagagcccgtcatgttttttaaggcgtcattttaaacggcagcgatgacttccgccgtcagcagcaccctgatcgattgcgcaaggcttgcaaatcgtatcagtctgcggaaaaaaacaatctctccgctctgtaaaacaaaattccatatttatcctccatttccacattacctttatatgaccaatacaagaagaaggaggttccatttcaatacgaaaaaccggctgatcccagccggttttataaataaacccctttatttacggtaaaacagtgctccccattaaataactgtcgacttcgcgcgctgcttcccggccttcattaatcgcccatacaatcaggctttggccccttctcgcatcccctgcggcgaaaacaccgtcaacattcgttttataatccccatatgccgcctgaattttatgatttgccgaatcgactccgaactgtttcaataatggctgttctgtcccttcaaaaccgatggcgatgaacaccagctgagcaggccagactttttctgtaccgggcagttcatgaaattcatactttccgaattcgtttctgactttttccatttgaatggtgtggatctcttgtaagcggccctgcttatcggccaccatttttgtcgtttgaattgaatattctctcgggtctttgccgaactttgcctgcgcttcttcataggcgtattcaagggtaaagacgtgcggctgttcaggccacatattgtcgttcgtgcgcgtctgaggaagtttaggatgtttcccgaactggtgcacgctgcgcgctttttgacgcagcgcggttgccacgcagtcagctcctgtgtctcctccgccgatcacgatgacatctttccctttagcgtctataaattgtttgtctttgaagttggaatctaaatagcttttcgtcgccagtgttaaatagtccatcgcataatggacgccttttgcttcccggccttcaatcagcagattgcgctgcttttgggcgcctgtgcacaaaatgacggcatcaaattgttctttcagctcatctgccgttatatcaacgccgatttcggtatttgtcacaaaatctataccttcctgcgtcaaaagcttaatacggcgttcgacgacatttttctcaagcttcatgctcggaatgccgtacatcagcaggccgccggctctgtcggcacgctcgtagaccgttacggaatgaccggcttgattcagctgatcagcgcttgccagacctgccgggcctgaaccgacgacagcgacttttttacctgtgcgtttcgcgggaattctcggctgaatccatccattttcaaaacctttgtcaatgatcgtccgctcgatgtttttaattgaaacagccggatctgaaatggccagcgtacaagatccttcacaaggagcgggacagacccgccctgtgaattcaggaaagttattcgttttcagaaggcgctccaaggcttctttccagcgcccccgatagacgaggtcattccactccggtatcagattataaatcgggcatccggaggtaaaaccgttgatatcagcgccgatttggcaaaacggtgtgccgcaatccatacaccgcgccccctgccgctttgacgcttcatctgaaaatggagccgaatactctttccaatcctttaagcgagtgagagggtcccgctcagccggtttttctcgtttttcttccatgaatccagttggtttccccatgttcctctcccctttcttactgtactaccgcttgtttttgatctttggcaggcgtttgctgaacctttgtattggcttcaaaagcatacataattgcgtcttcttctgataaacccgccgctttttgttcttcgatgctgaggagcatttgtttatagtttttcggaatgactttgataaaggtttctgcggctttttcccaattgtccaggagatttgcggcttttttgctgtttgtcagcgccgcatgccgtttgaccatttcttgcacttctttgatctccgcctcatccgtcagcttttcaaatgaaatcatttccatgttgcatttgcgtttaaatgctttggcatcttcactcaggacgtatgcgataccgcctgacattcccgccccgaagtttttgccgacttcgccgaggacgacaacccggccgcctgtcatgtattcgcagccgtggtctccgataccttctacaacgacattgactccgctgttacggactgcaaaacgttcaccggcgcgcccgttaatgtacgcttccccgcttgttgctccgtaaaatgcgacgttcccgataataacgttatcgtgtgtttcataattgaaggcatcaggcgctttcacgatgatttttccgcctgaaagccctttgcctacgtagtcatttgaatccccgttcaaatgaagcgtcatccctttagggacaaatgcaccgaaactctgtccggctgatccggtaaaatgaagtctgatcgtatcatccggcaggccttccgctccgtagcgtttagaaatttcacttcccgtcacggttccggctacgcggtttgtattattgatcttgatttcagcttccgcttcctgaccggcttcaattgcagcctgcaccgccggaagaataaccgtcatatcaagcgactcgtcgattttatggttttgcgccgtacggaaagtgcgtatgccttcaggctggtacagcagtgtggataaatcaagctggcccgctttccaatgcgctttcgcacgttcactgacatgaagaacgtctgtccgtccgatcatttcatcaagcgtcttaaagcctaactgcgccatatattcacgcacttcttctgcgacaaacagcatgtaatttacgatatggtcaggattgcccatgaattttttgcggagctccggattttgcgtcgcgacacctacaggacatgtatctaaatggcaggcgcgcatcatgatgcagccaagaacgacaagcggcgctgtagcaaagccgaattcctccgcaccgagcaaggcggccatcacgacatctcggcctgtcatcagcttaccgtccgtttccaataccacgcgatcccgtaaaccgttcagcatcagcgtttggtgagcttctgcaagaccaagctcccacggaagaccggtatgtttaatactcgttttcggcgatgcgcccgttccgccatcgtagccgctgatgacgatgacatccgcagtgccttttgccacaccggccgcaatcgtgccgacaccggcttttgacacgagcttgacgctgattcgcgcgcttcgatttgcatttttcaaatcatggatcagctgcgccaaatcttcaattgaataaatatcatggtgaggaggcggtgagatcagccctacacctggtgtagaaccgcggacatccgcgacccaaggatatactttgttccccggaagctgaccgccttctcccggcttcgctccttgcgccattttgatctgcaattcatccgcattgacgagataatggctctttacgccgaaacggccggaggcgatctgtttaatcgcacttcttctgtcgtcgccattttcatccggaacgaaacgtttcgggtcctcgccgccttctccgctgttgctttttccgccaagcctgttcatcgctatcgctaaagcctcatgggcttccttgcttaatgaaccgaatgacatcgctcctgttttaaaacgtttcacgatggacgcagctgattcaacttcctctaattttaaaggcttgcggtcttctttgaaggcgaacagattgcgtaaaaatccgattcgttcttcatccgctgcatgagaatactgcttaaacaagctgtaatcattttttcggcaggcccattgcagcgtatggatggttttcgggttgaaagcgtggtgctctcccccgttccgccattggaattcacttccaggatcaagagtttggctgtaatcatccttgtacgccgcttgatggcgctgtttcgcttcttgcgcaatcgtctcgatatcgattccgccaagctgagatgcagtaccggtaaagtatttggcgataacgtcttcaccgatgccgaccgcttcaaaaatttgggcgcccctgtaactttgcacagttgaaatccccatttttgacatcactttcacgacgccttctgttacgctctttccgtatttgctgacagcttcttcatacggaatatcaagccggccttcatcgatttcctgcttatacgtagcataagtcaaatacggattgacagcatcggcaccatacccgatgagagccgcaaagtgatgaacttcacgcgcttccccggattcaacgataatgcttgcttttgttcgcaggccttgacggatcaaatgctgatgcagcgcactgacggccaaaagcggcggaatcggcgtcaattccttactcattgccctgtcagataaaattaacagagatacgccttccttgatcgctttttccgcttgctgaaacaaatccttcaggcctttttccaggtcatcggaaaacagcgtgcggatgttctggctcttaatatcagggtgcacaagtgttttcagcgcataaaactgttcgtttgataatacaggagtatacaattttatgcggcgtgcatttctttcactcggatgcagcagatcaccttcagccccaagccatgtcaccgtagaggtcacaagctgctcgcggatcgcgtcaatcggcgggtttgtgacttgcgcaaacagctgtttaaagtaatgaaacagtgattgggcgcgatcggataaaacggcgagcggcgaatcatttcccatagagccgagcgggtccttgccttctttaataacaggaattaaatatttctggatatcttcatacgtatagccaaacgctttttgacggacgagaagatcatcgaattgttcctcttcccggatttccgggtcaggattcacttgaaccaattcttcttcaagccatttttgatacgggaattcattggcgatttctgtttttacttcttcatctgaaataatccggccttcctctaagtcaatgagcagcatttttccgggctccagacgttttttatgaagaatgttcttctgctccacttcaataacgccgacctcagatgagaaaataatatggtcatcttttgtcacatagtaacgtgccggacgcaggccgttacggtcaaggatggcgccgatttgttttccgtccgtaaacgaaatggcggtcggcccgtcccacggctccattaaagagctgtgatattcataaaaagcccgtttcgctttagacatgtgagtgttttccgtccatggttccggaatcagcatcattgccgtatgtgccggtttccgccccgccatcacgaaaaattcaaacgcattatcaagaatggatgagtcactgccctcagcatttaaaatcggcagcactttgtgaagatcgtctccgaagctttctgaaacgaactgctgctccctcgctctcatccaattgatgttgccccggagcgtattgatttctccgttatgaatcagatagcggttcggatgggcacgttcccaagtaggaaaggtatttgtgctgaatcttgaatgcacgagtgaaaatgcagatacgaaggtttcatcctgcaaatccaaataaaaagcgtcaacctgctcaggcgttaacaaccctttataaacaatagtctggcttgacaggcttgcgaagtaaaaatcaagctgttcttgaacgccccaattttcagcctgcttccggataacatacaatttgcgttcaaaagcaaggctgtctttcaaatcgtttgcggctccgataaatacttgacgcacatacgggcaagtgctttgtgccactgttccgatttttccgacatttacagggacggttctccagccgagaacgatctgtccttcctgctcaatgaatgcattcacctgtttttcgatcttttttctttcctcttcattttgcgagaaaaagaccattcctaccccgtaacggcctttttccggcagcttcatttctccgcactctttcttaaaaaaagcatcagggatctgaaccatcaggccggcgccgtcacccgtattcggatcactgccctgtcctcctctgtgatccagctggcaaagcatcttcagtccttttttgacaatgtcatgtgaaggtttcccttttaaatgggcatacaagccgattccgcatgcatcgtgctcaaattccggacggtagagaccttgtgctttcggcatttgattgtaagtcataattcctctcccccgatcagtttccgttaattatcggtcataaaatctgacaactttaaattaattgtaagttttcaaaacaatataaacaatatataatttagatcaaatacatctcaaaatgagatagatgggtgtgaacgcaatggaattacgccagcttcggtattttatggaggtagcagaacgggaacatgtgtcagaagcggctgatcatctgcatgtcgcacaatccgccatcagccggcagattgcaaatcttgaagaagagctgaaagtcactttatttgaacgggaaggcagaaatattaaattaacgccgatcggcaaacaatttttagaacatgttaaaacggcgatgaaagcaattgattatgcgaaggaacaaattgatgaatatcttgatccgaatcgcggaaccgtcaaaataggatttccgacgagccttgcaagccagcttttgccgactgtgatttcggcatttaaagaggaatacccgaacgttgagtttttgctccgccagggttcttataagtttttaatcgaagcggtaagaaacagggatatagatgctgcgctgctcggccccgttccgacggaattccccgacataacaggcaatatcttattcacggaaaagatttacgcgcttgttccgctgcatcatccgcttgccaaacagaaaaatattcatttaattgatctgcgcggggaccaattcgttttatttcctgaagggtttattctccgaaacatggcgattgacgcttgcagacaggccggctttgcgccgcttgtatcgacggaaggcgaggatttagatgccattaaaggattagtctccgcggggatgggagttactttattgcctgaaagcacctttgcagaaaccacaccccggttcacggtcaaaattccgattgaatttcctcaagtgaagcggaccgtaggcattattaaaccaaaaggaagagaactggctccgtctgcaaatgatttctatcattttgtcattcaatttttctccaaacttgaacaatatcaataaaaaacaaacccgagcttcaaaacgaagcctcgggctttttcatatttttatagatctttctcagccgatcggaatggatagttcaacgtggcagacaaacgcttccggatcaatgactgattgatcggtctgtttgtgaggcgtttctttaaatgtcttcagctgggctgaggaatagttgacgatgccgagtccgagctcttctccctgctgatcaagcagcctgacaaccgctccgctgctgaatctgcccttaatctgttcgatatcctgcggtgacagcgccatatttccgtttgcgacatcgcggctgcttttcttttccatcacaatttcgccttcggggccggaattaaatgcaagccattgttctttgtggtttaacggcagggttccttccgcttcaaaataagttccttcagccgcctcatctaccgcttgaagcagaatgtccggaatgttagcctgcccgagaaagcctttaataccggaggccatcacaatcttaaaagcatccagtttcgaacgcattccgccggttcccatttcactcccggcatctcccgcgcttgcttctatttccggagtgatgtcacttacatgtctgattcttttcgctttcgggttgctgcgcggattatcatcatataaaccgtcaatgtctgataaaattacaagcatgtcggcatcaattaaacctgccaccttcgctgcaagtgtatcgttatctccgaatttcagccggttgactgtgaccgtgtcattttcattaataatcggaataatgccccgttccaaaaggacgttcatcgtattgcgcacattatggtagcggtattcatcggaaaaatcgcttcttgtaattaatatttgtgatgcgacataaccgtgcgctaaaaacagctttgagtaagcctccattaataatccctgcccgatggaagcagaagcctgtttttcagggaggccttccggtttctgaataaatccgagcttccgataacctgccgccactgcgccggaagatattaaaatcacttcatagccgctgtccttcagctgtgcgatttgatccaccaatgcttccagctttcttctgctgatttccccgtgcaggctcgtcagtgagctgcttccgattttcaccgcgactcttttgatcttcgtccgagacgtcactgtatcactcctgttttttaacgattatagtgctgccgttttttcaattgttttgctgatctcaatagaacgttcggtcgcgtgtttaatggctttggcaatggcttctccgccgccttctgacctgagcgcatcgaggccggcttccgtcgtgccgtttggagaggtgatgttttcccgaagcacatccggtttttcacccgtttccatcagcatttttgcagcgcccaataacgtttgcgccccgattttgcgggacagccgtttgtctaagccggcttcttcacctgctttttcaataaactccattaaataataaaagtacgccggtccgctgcctgcgatgccggtgaaaatgtccatctgatcttccttgatcacgtacacttccccgaggcattccaaaagagataccgcggtttttgctgaaccgtaagagacatggtctccgaaagccgcagctgttgccgattcgccgatcatgctggatgtgttcggcatcactcttacaactggctgacggtcatgtaatgattgttgtataaatgaggttgttatgcctgccagaacagacaggatgatttgatgaggttgaatacgccgtttcagcgtagcaagagcgatttcagcatccttcggtttcatggctaaaataaagacatcaatgtcttcggttttcatgctgtcaaaagcaatgccttgaattccgtattgatgttccaattcagcgagtcgctctgtattgcggcggtttgtcacgcagatgttttggttgggaattttttttgcgcggaccatgcctgatatcattccttcagccattgatcctgctccgataaaagcaactttcttttgatctaagatcggtaacatctcccttgttcgtattttgttcgtatttttcacacgttttttatgttaccacttcaggagtcgatgtcaagtttggaggttttattgatatgtattgttccgagcctgttattatgtataatgaatcacagaacaaaccttttgagcccgggaggccgggagcgttccggccggatttaaaaattatctgaaatggctttttctatcagctttttgcagcggtcaagctctgtcttcagctgttttttgtaaagctttgcagcttcatagtctttaaattgatagagaacgacttcctggagtttggctccctcttttttcacttttacttgctttaaaatcccgtcatccaaaagttcgtgaagtgaacggtacacctcggtatgattcggcttaaaaccgatgggtttaaattccgaacgcagcacctcgagaagcttcagtccgtaaagccgttcctgctctgtcattgtaatcatgtaaagctttaaaaaggctctttgttttactaaaaaaccggttgaacttcttttttcttctttcaatatgtgcccacccttccttctaacaaattattccatgtactaaatattctctttatatcccgttttcccttttattgttcggacagtttggtttatattgatttgttttttggatgcggggaaaaataatcttattgaacatttggtacatagtttatttagtttaattatagctgatatcggtttctttttcactcttttttctgcaaaaacggatctttatgcctatttaatcgggttgcgaaaacaaaaaagacccgtcacaaagacaggtccccttttgattaaggattagttgaccacaaaccggcagttttgatgaaaatgcgcgggtgtaatttcaattgagcaaccatatattctgcaagatcctcaggctgcatgactttttccggattgccgtctgtcagatttaattcaatagacatgtcgcttgcaaccgtgctcggagtcattgcgctgacacggatattgtgttttctgacttcctgcatgagagattcggtcagaccgagaacggcaaatttagaagcgctgtacgcacttgtcgccgcggcgcctctttggcccgccgtagaagaaatattaatgatatctcctgattttctctcaatcatttcaggaagaacggcgcgtgtcacgtggtatacacccattacattaacttgaatgatgtcttcccactcttgaggcgtaagatccaaaaatccgccgaatttgctgattccggcattgttaatcaggatgtcaacctcaccgagttcttctttaatagaagagacggcttgttcaacctctttttggttttttacatcggcagcagcgaatgatgcctttacaccaagggctttcacttcttccgcaaccttttcgacatttgcttctgtacggccgattaaaccgatattgactccttctttggctaaagcgatagcggcggcgcggccgattcctctgcccgcacccgtgataagagccgttttgttttgtaagctttccatgtctttcaccctttctgaatgtccttatgtacgatttcacattataagcagaaaaaaaacaattagcaaataaaatgattcagcacgatccgtaaagggtatcaactgaaaaaaaggagtgaaaagcagatgatcatcattttgtatatcagtgctgccgttgcggctgccgctttaatttatgcagccgtatccgccgtgcattttaaaagaaacacagcgcctgatataaagaagattaacgccgtgacagcgtccatgcagacgtccgttgaagaaatcaaaacagaaacccgtttgttatcacaaaagcagaaagaactgcaggaagactttcttactaaaaaaacagccgtgcaaacgacggcagccgaagttaaaggaacgcctcacgtcctgaaaatgctctggaacgccggtaaaagcggtttatgagcctgcatgtcatccgacgtttttgatgacactaagagaaactggcggattcaaggaggcataacatgatttgcgatcgtgagcggcttgcgcattttttgcagcagcttaaagcattatcatcttcgggaggatttacaaaatcggatttgctgacttcggagttccatttagccaaggacggagatctggatatgtattattcgcctcataatgagtatatcaacccacatgctgcggttgtcatctccggaattacacccggtttttttcagatgcagcgggcgtacaaagcagcggcacagcttttaaaaaacggcgaatctcttgaggtgatagcatatgagacaaaaaaagcggccggactttccggttccatgaggcagcacatcatcgaaatgcttaatgaatgcggtctgccggccgcgcttcacgttgaggattcatcccggttttttgattcaaaaagggagctgcttcatacgacatccgttatcaaacaccctgttttttataaacagaaaaactatacgggacaccggccggccatcagcagatcagctcttctcagccgttacgcgctgacatgttttccggatgaaatagaaatgatgaaaaaagacattctgcttatccctctcggaaaagcagcagaatcagcctgccgcacgctgaagaagaaccgcagaatgggccatgcggtcattctggaaggcttcccgcatccgtccggagcaaacggacatcgtttcaaacaatttcacgaaaacaaacaatcgttacgtgaacaaattcagcggtttgccgggtttcttcatcagccgtaaaaaaacgccccgaattttcggggcgctgctgttaagaagcgtattcaggcaatgctttattgtgttttgccgttttctcttcaggtattttgatttgatttgtcaagatcgcacttacgaaatagagcgctgcgaaaatccatacaacgccttgtgcgccgacaagcccgatgaacgcccaggcaagcgcggggccgacaaatgccgacaggcccgcagccagatttaacacagacatagcagcacctttattgctgccggccgccgtcggcacgatagccccgatcggaacgaacccggcgaggagccctccccatataaaaccgacaatgctgacgaacagcaaattcccatgtgatacaacaggagcataatataataaaagagtaaaaatgccgcagcccactcctccgaaccacatgacagtctttttccagccgaaggcatcgccgactgcgccgaagattaagttaaagacgatatttccgagaaaaatcgttccccaaatttgcagccatacatttgtagaaatgccgtgctgcgccatatgcatcgggaggaataccggaaatccgtatgttccgatgctgttaatgattcgaatgatcccccagagagcacgcgcggattttcagcaaggatggtgattcccttcattaattcctgcgccttttcccgcttatctgcctttttcttttcaaagcggtccctatttaaaatcaaagcaaaaaacgcgccgagacatacccagaaaattgaactccacagcgtattcaaatagccgaaggatttgatggcccagcttgaataccaagcaccgaatacaaacatcccgcagcaatatgcaatccagaaccagccgaccgccgtactgagcctgtttttcggcgaccggtaaatcacccatgtcaaaaatgaataggcaaacagcgggtaacccagccctttaataaaatacgtgacatacatcaccggcaaattaagattctcaaatccgtatgcgataaacgcggctgttccgatgacgtaaaacaacagccccataaacatcgtccgctttgcgccgaaggcttcgaggcagactcctgaaaaccacgacgccacagcaagagaaataccgtaaaccgtaaacaaggatgctgattgctgtaccgtcaagccgttttcgactaaaaacgggctgagccagccttgttcaaggccgtcccccatcataaacagcacgacccctaaaaatccccaggcgagctgtttcggaattcctattttattaagcatttttgttcctcctcagcaatctttcatgttgtcatctcatccccaagtcaggctttcaccgccggctgaaaatgagtaaataatttttgggtatgtttccattcttcatataggaagagatccgtctgatccgcttccggctcaattacctttgtgcaggtcgaaagctctgctttcacaccgagagcttcgttgcaaatcatcaccgctcccattgcggatgcctggctgaacccctctctcttatagattttcttttgaagaaggttagcaagaaactgcgtcaaagcatcactttggaaaccgccgccgcacaccttcacataatcttgtgaaaaggaagccgcctctgttaacgcctcatagttccatttgattgaaaaagcgatttccagcagtgcagctttgacaaaatgggctctgcttaagttttgggacagcggagcgtcaaaaataaatccgccttttgccagtgcgtttttctcaggagataaataggagcctaacgcagatatacaggcatgatcatgtttcggcagacttgcgatttcccgttccatgacgctgtaggattcattcggataaaaaatggattttaatttttgataattgagtcctgttacacccggattcgtttcaagaagccattcaccttcttctgtatggcaattcagccatgcattctctaaactttcggttccggtctccgctgttatctttgtaatcggcgtcgtcgtgccggatacaatgacgatatctcccggctttgcatctgcacttttgatggcaagctgtgtgtctcccccgcctgcaatcacaggcactctttcagaaagaccgagcaccgccgctttcttaaacgttaacattccgacaaccgtcccagatcggacgagtgaaggaagaatggcagaaggcacaccgaagatgttgcataatttctctgaccacgcctttttccttacgtcaaacagcagtgtttcagcagcctgtgacggttcatagcttaaaattccgctcagctcaaatgtcacccagtcactgatgcttgtgatgcacttcacttctttccataaagacggctgtctggcttttaatccgacaagtttcatggcggaaaataaagcgctcggaagacgtccggtttgctgatgcacttcttctgcctcaattccgccttcccattcacgccctctgttatcaatgttgggcagaccgagaaatgcctttttatctttattgatcaaaacgattccctgcctctggcttgttgaggtgattccgattaatgtaatatgagggctcttggcaatagcctttcttgccatagcgctgatttgcgtccataacccttccggtgagaaatatcgtccgtccggataaagcggatccgtcacatattcaatgtcttccctttcaagcgcggtcacttcgccgccggcagtcacgaccgcgactcgcgcattcccagtcccgatgtcaaatacaaggtagcctttttgttcagccattacagcctcctccttccgtttcaagttctcttttgttataaagttcacgtattgaataggtttgatcttgtttccatttgaaaagcgcttcatttaaaatcttcacatgatgatcttccacttcaaatgttgcgcccgctaaatggggagtcgcgaacacattcggcaaagagatcaaatcataatcagaagattcaggcggttcgtgataaaacacgtcaaggatcgctcccttaatccgccgttctttcagcacccgcagcagctcttccctgtctgtaaccgccgctcttgacgtattgacaaaaacagcttcctgtttcatcaattgaaagtgccgggcgccgataaggccgatggtttcttctgtgcgcggcaagtgaacggaaacaatatcactttcagaaaatacccgttcaatcgtcgttttttcatactcccggttttcatgacggacaaatggatcatagtaaagcaccttgcagtcaaaagcggccaatagcctggcgattctctgtccgacagctccgaaaccgataaggccgactgttttccccgtcagctcatttcctctgaatttgacgtaagcctgcaaataatcaccattccactttccgtccttcagccactgatgggaagaatacgtatgacgcaaaaatgaaatcacattcccgataaacatttcagcaacggcctgggcattgcgggccggtgtaaagaaaacggggatttttcttttagtcgccgccgcaatatccacattagacggcattcctctgcagacaccgataaaagcggaatccggcaatatgtcaataacacgctgagacacctcatcaagttcggttataagccccgacgcgtttgtctcttgaatcatccggatcaattcatcttcccgataggcccggccgtgcttcttccacggccggtgcacagtccggccgaacagctcagccagctccttcagcccctcgtcgtgatatggcgcggtaattaaaaccgtcatggtgcaaaacatccttttcacataaattttttcataaaaaaatctctttcctcaaagaaggaaagagattcatataccgtctttatacgcttgaagcgcacaaatatgtatagaccattctttcctatctttcaagcatacgcttgctggaattggcacaataaatgttgccgaggattcatagggccagtccctccacctctctggatagaaaataaaatgatgaaattgtcaggctgtttaaaagaataaactcatcatagaaaagtctttccgtaatgtcaacacttttttctgaattgacgttcgattttgaaatgttataatgcttacaatataaacaaagaggagaaatgggctatgaattctgctgcaacacagccgaacggggtctttaagtcggtgtgctcactagactgtcccgatcaatgcggcttgcttgtgacaaaaaaagacggaaaaatcgttaacattcagggagaccccgatcacccggtcacatcagggaatatttgcaacaaagtcagacacatggctgagcgtatttatgatgagaagcgcgtaaccgttccgttaaaaaggatcggtaaaaaaggtgaagccgcgtttgcgcctatttcctgggaggaagcaatcaatacgatcagttcgcgctggaaagagcttattgccgaagaaggagcggaaagcattcttccgtacagcttttacggcaatatgggaaaactggcggcagagggaatggaccgccgttttttccatcgtctcggagcgagtcatctcgaacggacgatctgcagcaaagccggttctgaaggctataactatacaatgggagaaggagcgggtactgatccggaggagaccatacatgctaagctctttattttttggggaatcaatgccgtcagcacgaatatgcaccaagtcatgattgctcaaaaagcccggaaaaaaggggctaagattgtcgttattgatgtacataagaaccaaaccggccggcttgctgattggtttattcccattcgtcccggcacagatgccgcactcgccctcggtatcatgcatgtcttattcgctgagaaccttcacgatgaagcatttctcacagaatacaccgaaggcagtgacgaattaaaagcgcatgtcaaacactatgatccggaaacggtttctgctattacaggcgttaaagccgacgatatcagacgccttgcgagaatgtacggggaaacctccccttcccttatcaggatcggaaacggcattcagcaccatgacaatggcggaatgatcgtccgcaccgtcgcctgccttccggctgttacaggacagtggctcaacaccggaggaggcgcaatcaagcacaacagcgcggtattaaactataacagacaagcgctccagcggcctgatctgctttacggccggaagccgcgatcatttaatatgaacaggctcggaagcgttcttttagaaacaaaaccgcccgtgcgctccctgtttatttacggtacgaatcccgcagtggttgcgccggaagcgaataaagtcagaaaaggcctgctgcgggaggatttatttacagtcgttcacgatctgtttttaacggaaaccgccaaatatgcggatatcgtgctccctgcttcatccgcttttgaaaacacggatttttacacgtcttactggcatcattttattcagctgcaaaaaccggtgatcgaaccctacggagacagcaaatcgaatacggaagtgttccgtctgcttgccggagcaatgggatttaccgagcaggagcttcaggattctgatgaagaattaatcagacaggcgctggactttcccgacaatccgtatatcgaggatattgattacgaagcgctctcaagccattccttcatgaaagccaaacggaaaaaaccgctttttccgggaaagctcaagacaccgagcggaagaattgaattatattcggaaaagatgaaacaggacggttatccggcgctgccgacacacatccctcttgagagcgatgacgattttccgcttttatttgtcccgggaccgaatcataattttttaaattcgacattttcaaataacgaaaaacacgtaaaactggaaaaagcgccaaaactttttattcatacagaagaggctgtacaccggaacatagaagacggagaaaccgttagagtttggaatcaccgcggagagtgcgaattgactgtttcggtcggcgaacaggtgcttcccggcgttgcggtgagccaaggtctttgggccgatatggatgataaaaaacagctcgtcaattcactcacgcccgatcggctggcggatatgggcggaggtgctgttttcttctccggaaaggtgcaggtggaaaagctcagcaatcaaaaccgtccgcaataaacgcccggcggttttgctgaaggctgaatcctccggccggcttcaccgtataaaaaatgataacgtttattggaggtttggatatattaccggcattggaatcgctttagccggatatttcatcggagacggattgaaaactttaactcacctgatcctcatgaatatctgacattccgcatatcacgagaaacggaaagcggtatgtgcagaaaccggcattaagagaatggctgacttccatgctggaaaaagaataacagctgctatgaaaagcgggaagagtttttctcttcccgttcattaagatttgccccactgcctctcttcaaccccaaacatacgacagatatcgttcttacgtaacgaaacatccccttcttttgatttcaaataaaaccctttcttatataaccgtatgacttcctcatatgtaagctcatgacgaaggaacgccattaaacgcccatctttttcatcttgtttattgaaccattcataccgttctgaccagttcactttctgaatgtcaaacaccttcccactttggattaatgcccttttcgcatttattatacttatttccccttttgtaaacactccgactgtctgtggcatttttgaaaacagccgtacccgccctattagtcaccatgttgacttatttcccttcgtgatgtatattgtaattgtcaacatggtgacaatttagatgggagataacttatggatattaaattactaatgaaggaactgcattttatgcaacaaagttacgcatcattattttcggttgtcaataaggtgcagactcggggggacgaatacttagaaatgttgacttcccgacagcacatgactcttattgctattgcccatttaccgacggaagataccacacttatgaatatcgctaaaaagctgggcacaacaaaacaaaccgctaacaaattaatttcaagtctctcgaaaaaaggatatgttcacactgtgccaagcaaactggataaacgtgcaatcaatattgagattacccctgaaggaaaaaaagcgttaatttcctgttcagaaagatccacctattttttagcggatatgtttcatgagttcacaactgaagaagttgaaacattctggaggctattgcaaaaactttatcgttttgatggtgaagaacaggacggttttgaagaaaaagcacatttgaaagttgaagaccaggcacaatccatctcagatgactatgaagaaaaaatcatggctgaattttcaaaacggcgatatgggagtgcaaacgatgaataatatgctttatcgaaaagtaaaagaaactgaggataagatgaaggaaaaatgctatgagctgaaagataaaattgatcaatttatttctcatgctaaatataaacttcattgcaatcgtaaactggaccgagccggcaattatatatcaattgccattggactctttatcctaactgcctcatggctgaccgcaacacaatggctgctttggataggcgcggcgagtattttgagtaatgcctgtttgctcattataaagcctgttaaaaattgaaaatctgaaaaaagctctctaaaagagagctttcttttattaatcgtcttagtcttcatcttcttcccgattttctttcatttcatgaagtctttcataaaagaactttataaaatgggcagaattaagttctttatagccaccgaattcactccaaataacaactggacattctcctttccgttactttaagtacatttattcacaaagtaatcttttttacaggtcatttagtggcagccccaggaaaatgcgaatttacaacgttaatcaaattcaaacataaaaaagtcgaattccctgtcctttaaggaaaacgacttttttatacggcttcttcaagtaaatccccattaaccttttttggggaagatttgtaacctctgcgcagtgaaattatacctgtgctagcccgccatctacgaacaattcaatacccgtcaagtaactgctttcgtctgaagcaaggaaagatacagcgttagctacttcttcaggtgtcccaacttttccagctggaacagtatttctggcattttccatcgctccttcaagtgcatcaccaaaaagctcatcgtatgcaggtgtaagaatcactcctggacttaccacatttacacggatttcagtaccttttaggtcaagaatccagttgcgaaccagtgctcttaatgctgctttagatgctccatatacactaaatgctgggttgccaattgatccagcggtggagcccgttacaataatagaacctactttgtccgggaatagtgataacgctttttgaacagtaaaaatggttcctttcacgttaatgccgaacgttctatcaacctgctcttcagtaatttcacctaatggaagaaagctgccgatgcctgcattagcaaaaaggatgtccaacttacctttttcctgctttatcatgtcatatagtttgtctaagtcttcaagcttagaaatatcaccttgaacaccggttacgttcttgccaatttggttaacagctttatcaagttcgttttgtctacgtcccgtgatataaacatatgcaccttcgtttacaaatttttgtgctgcagcaagaccaatcccacttgttccacccgttacaagcgctactttaccttcaaattcacccatacttaacactcctttagaattaatattattttatgtctagtacctttaagtacttgaagaacaacttacaagtaatagtatccttcagtaagcacattatcggaagtacccacttttttgtgatatagtaactaaaaagtaataaatgtggaatggagagctttagacatgaaaaaatttagctgtgggtttgaagtgacaaaggaagtgattggcggaaaatggaaaggccttgtattatactttttaatgaatggaccgaagagaacgagtgaattaaagcgcattatcccaaatataactcagaaaatgctgattcaaacacttagagagcttgaagccagtggacttgtgagcagaaagatgtataaccaagtaccgccgaaggttgaatattcatccactgaacttggagaatctcttaaacctatcttgcaggagctctgtcaatggggagaccattatgcggagcaaaagtatgcagaaggtgaatatgaaattgtacagccagaacaactaagttaggattgatgcagctgctgaagtaaatgctaaacaacttcaataccatcacctaacagatgaagaacagtcagaaataaatgagatattcaattttgaaagtgaagttataataagaagtgtcatggactatattcaggagaactttgatgaaattcaaaaaagagctgtttcaaatgttaaagagaaggttcagaaacttagccaaaagataaatgaagacatcagtaataacatttaatgcctatatggtctcttcgcatgcatcttttacacaaaaagacccggattttaattccaggtcacacttcggtcacaacttgctcaaattccctcttgcatttgtcgaactgctttattcaagatcataaaatttcaaacgaaccttacacgaaggaatcggggatcggcaaaacaaagccagatataacatatattaaaaaatctcttgcatttccacaccggccatgctatattcatatagcgatgagctgaattgtgtaagccgatgcacatgcccttgcggcacacacgaatgtggcgtgtggtgtatcgcctcaatacgcaaaagacgtttgcttctgcaaacgtctttttttattatccgattttcgttccgttcggtactgactgctctggcgtaagcaggacaacatctcctttttccgggatgccgccaagaacgagaacttctgacttaaatccggcgatccgccgcggcggaaagttgacaatagcggtaacctgcctgcctgtcagatcacccggttcgtaccgttttgtaatctgggcgcttgattgtttcatgccgatctcttcgccgaaatctattgtcatcttaatggccggcacctttgcttccgggaatacttccgcttttacgaccgttcctattctgagatcgagcttgataaaatcttcgatgactgccatatcaaaaactccttttttacaatcatgataccaaaaaaagacgcagtttatttaactgattttcaggattatttatcagattgaaaggtgtttcggaagacgcgcggcgttattcccttatgtctgacaaaccatctggtaaaggaagacaaattttgaaagccgacctcctgactgatgtctgtcagccggcattttgtttcaataagcatttgttccgctttcttcatacggagctcagcaatataagcttgcgggcttttccctgtctgctttttaaaccagtcggaataatacgccgggtggtaatgttccattgcggcaagctctttaattgaaaaagtctttgagagatttcggcggatatacgcaattgaatcattcgtacggttttcttgtatcttttcagcaatatattctgcaagcagactcaatgaatgagccgactgctgcttagtctcttctgtcagcagaaaccgaatcgatgtccaaaaagaatcaagcttattcagaacgccgggatcaaatgaacctttgaaaaaatatgccggtatgtcgagaacgagacattcgtttcgctccaaagaacggaaccgatgttcatgcccgggcggaatatacagcatttgatcaggttttaatctgatttcacgtctttctgtctccaagtccagctgtccttcgagcggaaagagcatttggcagtatgtgtgtgcatgagaatcaaaaatatgtgaataggtgcgccgctcacaaatgatatgttgtaatgaatccatttgtccctccttttactgatgcgtttttttatttagtttacataataatattattgttacctaccctgtaaacctcttaggaaagcaacaactgcaaacttccggctttccttaattgattcggttaattcaaatgcactctgttttctcaacacggcaaagccgtgaagaaggctcctcagtcctctcgcagcatgaatcgcagtgtcagactgtgcataaccgttagctgtcagctgcctgacaacaagctctacaagcaggcttgacagattctcaatccggccgtcttttatcttttgaaatgttgcgtcatataatccgggattggcttcggcgaaattgatataggcatcggcaagagcgagcaaagccgtttcacccgtcagtccttctgcagaggccgccattttttcaaataacatagttaaaccggagacagccagctctgttttaattccttgaaggccattgacaaaattgtaaagggaaggcggttttacgtttaaggactttgcaacggccgcaagcgtcacttcgttcagcccttttttgtcagcgatgcctgctgcggctctcaatatcatgtcaaggctcattccgactctcggtgacattatgatcggcctcccggcaggcttcgttcagcttcctcagcagcctcagccatcatttcaacgggattgcagagaacatttccatgtccggcggccagactgcttggttgatgagcgataagcgttcttgctgtttttacagcttcttctttattccacgtagcaaaagccggaaacggaaatttccatttcagcttccctgaaacagcaaggccgccccgtacttgaaaggcatctccgacgatcagcatatcatttctcatatctttaaaagcgaggcttcccggcgtatgaccgggagcgggaatgacaagtaaagatccgatccgctcgccgcctttcagcaggcgatcaggttcggtctgaacatttttcggcactcccccctttatcggcgtttgtgcttcatgctcaaataatgaagtgtcacctttcagcaagaaagaatcccgctcagaaatacagacggaggcatccggaaattccgcagctaatgagtcaagcgaaccgatgtgatccccgtgcgcgtgggtgagtaatatgtcattcagcggcttcccaagctgccgcaatgcttgtttgattcctttatgactgttaggcagtccggcgtcaatcagggttactcctacttcttcttcgaccaaataacaattcaccgggaaaagcgctggaaaaaaagtcagctgccaaacccttccgtattgtaagattctcatcaacatccccctaaaactaatatcgttagttttattataactaataccgttagtttatcaagagttttctgtttaaatcctgaaaaaggcgcgggcgcttctcttatgcaaaaaaaagaaacgcgcatactgtgataaaagatgctttcagcctgcgaataaatcagactactaaaaccagccggataagcatacactactcaacggagggggagtttcacaccatgcatatcacacttcaaagcatctgccctgtcttaatgattgccttttttctgtataaaaaggtgaaacggtccgtcggctttcagcctttgaaaccccgctggctttatacaagaatgattttgttttcattgctggccgcagctctggcgtttttcagcatcacacacccggctttatacggccatcttatattcggcactttttgcggctggcttctggtcctgtttgccaaacggaatatttcttttgaagaacgccgcggaaaaatgtattttcgcactcatctgtggattgaacttattctattaacgtttttcctatcgagatttgtttatcgcgttattgaaatttaccgggtcacagcggactttacccatccggaggcatacagccaaacggtcggggccgatccgctgaccatcagtatcttttatttcatcgcagtttattacagcggcttctctttttatgttttaaaaacgagcagagaccaaaccaataacagtcagtacggctgacatccctgtctaaaaagcagggatgttttttaatcgtgccgcgtatggtgaatcatttgctgaagcacatctaacacatgttcatcctcaggagaataatagatggatgttccttctctgcgtgatttgacgaggcgtagatttttaagaaaacgcagctgatgagaaacggtagactgcagcaaattcagcttttctgcgatatcatttaccgcgtgttcaccctgtgacagcaaatggagaattctgattctggtcggatcagacagcgccttaaaagtctgggcaaccaaaaataaagtttcctcatctaaatcgacagcggggtcattcgtctttccggattcgtgaaattcagtcatatacctcacccttcttttctcaagtagcccaattataccaaatgtcaattgatgcagatacatcctgcgcctgacaaaagaaccgttattttaaatttatgtttcaaatacgggtttccgcttggtttcgcgcatccatctgtgtcataatgaaaaagtcataatgctcctgaaattgagggtgaaacacagtggagaaaaagaaaaaaggctgtttcgctgccgcgggtcttatgatgatatgtgtttttgtcatggtttccttcttcctcattctgttattttcaaataatgaatggctcaaaagtcttccgtttgatgtcaaaccgatcgtgcttgaacggctgacagattacaaaccgcttgttgaagacgagctggatgaaaaaggactcaccaaatatacatcgcttgtactcggcatgatatatcaggagtcaaaaggaagaggaaatgatcccatgcagtcttcagaatctctgggtttaaagcgaaatgagattaaaaaccctcaaaccagtatcaaacagggaatcaaacaattcactctcatgtaccaaacaggcaagaaaaaaggcgtagacttggatacgattatacaaagctacaacatgggagccggctatattgattttgtggctgaacatggaggatcgcatactgaggaactggcaaaacaatactccgagcagcaggtcaaaaagaatccgaaactttacacttgcggagggaacaaagacaatttccgttatccctactgctatggtgattacacgtacgcagaaaaagtaaaagcaaaaacaaaaaccgttgaacaatccttaaatgtaacaacacttgaaacgcttgaagagtaaaaggcgccctgatgaggcgcctttttccatcaatagaaaaaagccgcgcagagcacggctttttttaataatacggtgagatcattaagtatacaatgacacccgtcagactgacatacagccagagcggcatcgtccatctcgcgatttttttgtggcgctccacctgcatgctgaatcctctgatcagcgtaaacagcgcaagcggcacgataacggcggaaagacagatgtgcgtaatcaaaataaagaaataaatcccccgaatgatgccgtggccgccgaataaagtattctcagctatcgagtggtacacgacatagcagatcaaaaacagcagagtcgtcgtaaacgccgccaaaataaagcgtttatgcgcttgaatatttttttgcttaatcataaagagcgctgccagcaaaaagataaaagtaaagctgttaaaaatagcatttaacatcggcagaatatgaatattggcaatgctgacctgtcccgatttcggcataaaaaacagcaccgcaattaacccgttgatcaaaacggtcaatgtcagcacgataccggtataacttttaggtttgttttctgtctgattcatcttatgacctctctcaattttactgactatccaaatggtatgagaattcagctttgatgtcaacggtttcgtccgcttcgtcagaaattagacaaacttaagccctaaaaagaccgggtgtttgagacccggcctttcgtcatattatgcttccttcaacagttcttctatcactttatgttcgttttcattcaacagattttttggaatgatccgatctatcggtttattcatatgctgatcgagaatatcggctgtttctttgtcccctgcgattacgagacgctcccattggtgtgaagcggccttttgatcaaggtttgaagccaatcgtttatacagcctgttttggttttcttcgacatgggctttggcggcgtcttcgtccattgatgcggagcttccgcttacatcctgcggtttccacgattcattgatgacgtcgtattgataatgctccaccccttcaatttttccgagtacggtttctatgatcttcacttcattctgctgggtgagaataaaagccgtgcttggaaattgttcacggagaagttctaattgatcaaggacagccgtttcttcccaataaaatcgtgtttcgacaggcacctgcaattcaatcgtctcccagacaccgccttcccccgatgcaaaaaatacgaggcttcgcggcatctctttaccaagcccatcgatatattgatagacacgttgcatgatgcggacgagagatttttcttcttccggatcacttacagacagatactcttttaatctccgaaaaccggttttcaaggcgattttccactctcccccctgctgatccggatttctcatatccgtatttacatataaggaaagcattttatcaggagattccgtcattacgtacttcaatttgccgatgagtgagtcaattgccattatagattcctcctttttccgctgctcactgttcctttccctatccccaccgccttaaaaacgtcaatccacatataaacggcagacttttctaaaaaagtttttgcaaaacccatttacaaaccaagacatcatttactacaatggatacttgtgtttgactaagacttttacgctgtgaaaggagtatgattttgtttactgcagaagaaagagatcagaaagagctggaaaaagagcttcataaacttgaatttcagattttcagaatgcgggaaaatctgatagatgtatcaaaagacgcgcgagtgcttggtattgatcaatcgaacaatgacgattggatcattgtttcctcgattgatgatggccaaacatgtaagattatgctgactgattgtgaatcagcctaccggggaagaggctgtttttcactgatcgcttcttattatgacaatgccattcatatcggggatattaaaggcccgccgaaccacggctacggctcgatctgcatgaaatttttaaaacatatcgccagagagcagaatatcccgaaagtgacgggcgacatcgctaagcgtgattgggatcatgtcgaccggctcgttcatttttatgaaaagcatcaatttgatgtctggattgacaatgatacgcaatcaggcggcattaaatgggtcgacctgtaaaaaatgatagataaaccctcgttaatatggtgtaatagattaaaccatttaaggagggttttttttgtatccggaaaaattgaaaaaaggcgacggcatccgtattgtgtctccggccacaagcatgtccgctatgtcagatgaaaatataaatgccgcgaagacaaaattggaggagctgggcttttgtgtctctttttcagagaatgcgaaagaaataaatgaatttcattcatcatcgattgaatcgcgtgtacgggatctgcacgaagctttcgctgatcctgacatcaaagcgattttgacgacactcggcgggttccaatcaaatcagctgctccgctacgttgattatgaaaacatcaagcggcatccgaaaatcctttgcggctattcagatattaccgctctcggccatgccatatatcaaaaaaccggccttattacatattccggtccccatttttcttcatttgccatgaaaaaagggctggactatacgattgactctttcttggcctgctgtgcttctgacaacccgtatgaggtaaaaccttcatccgagtggagtgatgataaatggtatttgaaccaggaggacagacgtttttatcggaatccgggaccgctcgttattcagcccggatatgcggaaggaacactgatcggaggaaatctatgcacgctgaatcttctgcagggcaccgaatactttccggagatggaacaagtgattctgtttatagaagatgatcatatgtcggacattcatatgtttgaccgggatttgcagtcactcatccatcttcccgctttttcagccgtgaagggaattgtcatcggacgtttccagcatgcttcaaatgtgtctgaggaggctctgcgtgccgtcatccgtacaaaagaagaactgtcatccatgcctgttatcgcaaatgctgatttcggccatacctcccctttgatgacattcccgatcggaggagcatgcaggatagaagccggctcagaaggcggacggatatggatcgatcggcattaatacataaagacgggaaaaccgccccgtctttttattttgacgccttatgccgcggcgtgcgaggagcgatcataattcgtccgccagccgctgccctcacccatacggaagctccttcataaaaacggctgatctcttcattatatacggcgtgtgtcagttcacgtttatcatgcgttccgtcttggttttttacgtttaaaataagtacaagctcgtgcctgccattcttcatcacgccagtacgtctcaccttttcaataacggctggccttcctctccctctgtcaagcgcctgaaacagcctgacagcaggcatagacagtccgataacgagcacaatggcgaaagcggtgcatatacctgcttgaaacaccggtgattctgtgaaggtattccataaacatatacattccggctccatcagattcatcccttccgattcttttttcacatccattccttattatattagagaaacgctttttctttttccgcatataacgattatatacagtcaaaaaagggaagaaaaaaagaacacaaagcatttcgccttgtgttcttcatctctatatgaaactagtctaatactttaacatttactgttctgacgccccagttgttagcgtcacttttctttgcaacaaatacgtcaattttatttcctttaattgcgccgcctgtatctgctgctgttgccactccgtaaccttcaacataaaccttagagccaagcggaatgacactagggtctaccgcgatgacttttgcatcagggtttttgtttaagtcaacaccggttgccgttacaccggaaatgccgccgtcgttagcagagtaagcagttgcagtcattgtcatctgctttttaggctcttgttggtttgtatttgattgaacaggctgctgttttgcttcgacagccttcgcttcttgtttaggttgttgttgttcttgaacaggttcttgtttaggctgctcgtttttgacagcttcttgtttcggctgttctgtctcagcagctggtttttgttcagtttgcggctggctggcttcttgagccggctgtgcagcctgagcctgagcctgacctttcacatttaacgttgtgcctgcgtaaattatatctgattgcaagttattcaagcttttcagattgccgactgatgttccgaatttctgagcaattttccagaggctgtcgccctgcttcactgtgtactgcccagatgtggttgtttctactgaagaaatagtcagtttctctccttcaatgattaaatcagaagataactgattccattcttttaagtcctttaggttcactccgtttttttgcgagatcccccagagcgtgtcacccttttgcaccgtgatttctttagcagaagcgtgagctccaaatgcagttgttgaaattgctgcaactgcgacaaaggacataatcgtcttcttcataagtaaatcctcccttgttagctttttattggcggctaacaggtgatatcgtaacatatgaaaatgtcagttcaataacaaaacgatttgaattagattacagttcctttacatgaaacatttctctcgcttggtaagtcttgctgaaaccttgatacagcaagggttttcaagcttctgatttttccggcgcccatgaaaaacacaatgtgcaaatttctaaaaaaactttttttcactctgtttctcttacataatttcggatttcttctaaaaaaaccgctccgtatttcaatcttttttgttccccgaccccttttacggaaagaagatcctgatctgttttcggaagtttcgccgacatttcttttaacgtctgatctgagaacacgacaaatggaggcacaccctgttcagctgcaatctctttgcggagacgccggagaagctcaaataattcatcattttcggtgacggcggcggcctgtaaggcttcttttctcgcgactgcgctttttccaagcagaacgtccctgcctttttgggtgaccataagcgtgggaaatgtgccgtccgccattctgatatattcatctgaaataagaaattcgataaaatcactgatttccgctgcggattgatgcttcataatgccgtaagtggacaggctgctgaagccgttttccagcacttttttatttttagacccgctaagcacctgcgccaccatcgtttttccgaagcgctcattcattctgatgatgcatgacaataccatctgcgcttcttttgtaacgtcatgggcggtccttgtatcagtgcaattgccgcacgcttcgcaagcttccgcctcattctcgccgaaatacttcagaataaaccgctgcaggcaatcttccgtatgacagtaatccaccatctgtctcagttttttgagatcctgcttttgtttttcttctccggcggccgattggtctattaaaaaacgctgcaccataatatcctgcggcgaaaataagagcacacactcgctgttaagaccgtcgcgcccggcccgtccggcttcctggtaatagctctccatatctttcggaatctgcgcgtgtaaaacaaacctgatgttgctcttatcgattcccattccgaaagcggacgtagctaccatcacttgtatctgatcgttaagaaaacgctcctgctggtcttttctgtcatcatccgccaatccgccgtgataacggccggcattgatgccgctgcgttttaatttctcatataaacggtcggtttcttttcttgtcgctgtatatataatgccggcttcgtgtttatttttttcgaggtaccgctcgataaaccggtctttgttttcgccctttactactttaaacgttaaattctctctggcaaaaccggtatatacagtttgttctttcttaatatgaagctgcttgcagatgtcatcatgaacctcaggcgtagccgtcgccgttaaggcgatgatgacgggcggttcttttaattcattaaaaaggatttcgatattccggtaactcggcctgaaatcatgtccccattgcgatatacagtgagcttcgtcaattgcgacaagaggaaccgtaatattctgcaggatgtgaatgaattcagaagaagtcaaacgctccggtgtgatgtaaaagagccggtaagccccttgtttcaaaccggtcaggcgctcatgaatgtcacggcttgtctgggtgctgttaatataagctgccgcgatacccgcttcttcaagcgcgtcgacttgatctttcattaaggaaataagaggggaaataacgattgtggttccttcaaacagcagtgcgggaatctgatagcagattgattttccgccccccgtcggcataatgcagaccgtgttttttctctcctctgcaactgattgtatcgcctgcttttggcccgcgcgaagactgtcgtagccaaaataatgcgccagaagggattgggctttatccagcatatgttgtaaaacctcactttgtctttgattctttcattttatcatactgataaagtacgctgctcaagggcaattcaaaataaaaagccatctccgcaagggaaatggctttcgctacgtatgccgtacgcaagtaagaaagttttaaaccaccactcctcaaagtgggtgtttgcagaagcgttcctgtcgtcctctgcaatggaggcatgacattccggcttcgatataaaactccctattacagcttaaaggttaaaacttaattaacaatacgaacaatgtagcttctcttatatcctacaccatcagtcgtattttggcaagagggttaattcttttacagaaaaccttttttctttgtgaaaaatgctttattctacataaaaattgttttttcgacaaaatatcaatatatcaatataagattgaatcgaaagctgccgccagtttcttctataatagaaaaaactctcacaccctgtaggggcgcaagagttatggcaattagaattttgcagccagatctttcgcttcttgcagtcctttttcaatgatcgcttgagcgttatccggtgcagcattatgaccttcaacgacaacagtgtgaagatcttggacaccccagaaaccaagaacggttttcatgaagtttaatgacatttcaagagatgccatcggtccttcagaatatacgccgccgcgtgcgtttaagagcgctacttttttatctcccatcagacctttagggccttcaggcgtgtatgtgaaagtaacccctgcgcgagacaggtaatcaacataagtatgaagcacagcaggcactgtgaagttccaaagcgggaatgcaaacacgactttgtcagctttaacaaattgatttaagtaaatgtcagcagttgacgcttgttttttctcttcgtctgtcatttcaattcctttagaagctttgaatgttccgttaatcatatctcttccgaggtaaggaaggttttctttatgaagatcaagttcgatcacttcatcattcggattgttttctttataagcagccagaaacgcttcgtataattttacggatacgccttcttcagccgtacggtcgcttgattttacaaataatacttgagacattctaaattcctcccggtaatcttttaatatttacttacaaatagtatgttactttcttttttatataaagtcaatgattttatttcgattctgagattttttatggaataaaaaaacaggtacatatgaatgtacctgctgctattattgtgaatcctgctcgcgatccaggatttcgtaagtttgtgagcttttttgatcaacggtttctttatttgagaggtctttcacctgctcgtgaaattccctttcatatgacggagcgtctgttttcacatccccttctgtttctcgctgcgcttcgacggtcattctggcgtacggtacggcttcaagtctttcataaggaatttcttttcccgttttctcgcaaatcccgtatgttcctttatccattcgttcaagcgcggcgttcacctcatctaaaagattctgatcgacaccgtccagcgtctgattcgtgaccctgtccaaataaatgcttccgtgatcagctaagtgattatctactccgttcgacagttctcctgtgtcttcgctcattgaatgattttctttggattctccctgaagactttcctttaaatcgattaatttatgataaaggctgtcctgctgttcttttgataatgccatattcatcatctcctttttcgtctgtattcttcgctgcatctgttaatacataccctcgaaaaaggaggatgaaacaatgggggtcaatgctttctccccctgatggtgacattgggtgtctgctgctttgtctgtcttttttctttcgcagcatcattttgcgggttgtcccgactttcttcagcgcaggcttgtttgagcctgtgcgccggtgtatggtaagtggcgccgatattcagcataccgctcagctcttctatactcagctgttcaaaatcaatattgtattcaatcttgtccactttgacgtgctcaatatggacatatgttttttccccttcaaccgtttgcggctcaaaatgacacttatcctgaagctcatcaagctgttgttccactttcttaagccggtctaattcttcttcacacacttttttgaaaatctctttcattatttttttcaaagaaaatcacttctttccccgtcactcttggaaagttctatgcgtcccgtattgcgaatatataaacatgatatacaaaaaggaggcgaatcatgatgttttttccatccgttatcaactttgagtatataaaaatgaacggaatcagcggcggagcggcttttaacaccggctcttccgttatggtgagaaacacagcagccaataaaagaaatgaagggtacggtgaacaaaacggtgattgcaccgttgtcgccatccctatcatgagtatcgatgattcagatctgatagatggcacagcgaacaagatcagccttcgataatgatctggcttgcatcccccagatgtttagcaatcgatatatataaaatcccgtctttgaataccgcctgcattcccttcgtaccttgagcggaatgcggaagatcgagttttttttcaaaatcgccgtattttccggtcttctgtttaaaatcctgttcattgaaaaaggattttctcgtgccttttacgacaatatattctccgtaggacaacagctgaacatcttgtttccggtagccgggcagatacagcaaaaattggagctcatcatgggtttccacaatatctataagaggaaaagcatcctcatttcttctcatttgcccatctccctgttgaaagggaaaatgagaatggccgttttgaaatgatttcagttgttcatcatcaaaaacgtttttccaaaagtcgccgccggacatgttttgcgccatttccatccattgcttcatcttatcgaaatccatttttatcgccccctgtctaagcatacggtcataacagccggcatacacctgtattaaaggaggtttgcctgtggttcaaccaactccatatatcaatattaatattttcatgttgaaaattaattcctttgaaaatgcttcagcggtgaatgtcggacaaaatttactggcggaatggcagaattctgataaaaagaatcagggatacggacagaacttcggagatgcaagcggcttcatcggcacgaacggcaaagtggatgaccgggatcaaattgattctccatcaacctttgagtctgcatgcgacaaaatccctgccggaaaaggaggcccattatgatgttttcgccggttttggtaaatgtaggaggctttaaagtaaatgcggtcgaccgcggttcttccattacgatcggcccgtatcagcaaatcgattattttttatccaataagatcaactacggattcggtgaagaaaatggtgatttggcgccgatttatatccccatcagttctatcgctgacccggatctcattgattcgaactccggaaaaacaagcattatataataaaaaggccatccgcatgcattcggatggcttttatgtgatatttaactgcataagtattttgttaagatggcttgaacctcagtcaagtccgtttcttttgcaaattccaattcgaaagtttttccccttgtcattaatacaagcccggtatcgggatcaaacatccccgcttcttgaatggcgaagctttcaattgttttatatggaagaaatacgcgcactttctttttggagaacattttattatcaaagaaaatcactcgtttattcgtaaagcatatttggtcaacccgcagtttataaatcgtttcgatccgttctccctcaacgagcaaagcctccagcttttttgtgtcggttgatctgctgacagaaaaaattcccaatgaagaaccccactttctgcttctatactattgttttattacaatcataaaaaataagttctttatccctatataagaatacgacatagacggcatttaaaccattacgaacagattacatttttagaacgttcatcaaaaaagcccttcgcgaaaggtgccgcagttatgaagtaatacggttcagcggaagaaaaggtttcaagaaaacggtatttttttcgaaaagtcagttttttattttcgccataaaaaaccgcggcttctccaatgccgcggtttcaacaaaacatcaacgatccgtatcttcaattgttccttctttataggtatctgaaatttgttccatcgtcgtgtcggtgccttcttcaggttgcacttgctgaagctgatctgatgttttattttgtttgtcttgctctgtttttttcattttgcagccaccctttatatgtagtcttttttagtatggctcaggcaaaatgaattcattcagccttaaacttcttcaaaatactctttgtagaagcctccgactttgtttgtattgtctgcaacaaaaatgaattcttctgtttcatttttgacttcatactctttacccggcgtcagcacatttttgacaatgtattttttcgcatctgtatgtacgcatttgacctttttgacgctttcttttgtctgccaattattatgaatcatttataaaactccttttcttaatcgataagcttattgtagccgttttttcttgtgaattgcaataacggttatcgattgattttaccgggggtgttattatagaatgactgtatgcgcttactttgcgcggacatcaagatgctcaaaacagaccataaaaaatttcgggaggtttgttacgaatgagttctttaacgatgcagatcacaaaaaggctggaaacatttttacagggtacgaagaaactttatattgacggaaaatttgttccgagcgcttcaggatcaacatttgtcacaccgaatccggcaaccggagaaacgctgatgacgctttacgaggcacagacagaagacattgacagtgcagtgaaagcggcacgcaaagcctttgatcacggcgaatggcgcactatgccggccgcttccagaagcaggctgatgtataagcttgccgatttaatggaagagcacaaaacggaactcgcgcagcttgaaacacttgataacggaaaaccgattaatgaaacgacgaatggggatatcccgctcgcaattgagcatatgcgttattatgccgggtggtctacaaagataaccggacaaacgattccggtcgccggctcatattttaattacacccgccatgagcctgtcggcgtcgtggggcagatcatcccttggaactttccgctccttatggcgatgtggaaaatgggcgccgcccttgccacaggctgcacaatcgttttgaaaccggcggagcagacaccgctgaccgccctctatttagcggaattaatagatcaggcgggcttccctgacggcgtcatcaatattgtcccagggttcggcgagacggccggggaagcgctgaccaaccatgacgatgtcgataaactcgcttttaccggttctacagaaatcggcaaaaaaatcatggaaaaagccgcaaaaaaaattaaacgcgtgacactggagcttggcggaaagtcacctaacatcattttgcctgatgccaatttgaagaaagccattcccggcgctttaaacggggtcatgtttaatcagggacaggtatgctgcgcaggctcccgtgtcttcattcacaaagacaaatatgatgaggtcgtcagcgaaatggtttcatatgcgaaatcgcttcagcaaggcgccggccttcaccaagatacacaaatcggcccgctcgtcagccaggaacagcatgagcgcgtgctttcatatattgaaaaaggaaaagcggaaggagccaaagctgtcgcgggcggcagctgcccgtttgaagaagggtattttgtctccccgactgtatttgcggatgtggatgacagcatgaccatcgcaaaagaagaaattttcggcccggtcttagccgccattccgtatgatacggttgatgaagtcattgagcgggcgaaccgctcggaatacggtcttgcagccggactttggactgaaaatgtgaaaaacgctcattacattgctgaccgtctccaagccggcaccgtttgggtcaactgctacaatgttttcgatgcggcatctcctttcggcggctataagcaatccggcctcgggcgggaaatgggctcttacgcgctgaataattatacagaagtgaaaagcgtctggatcaacctggaagattaaatcaaacaagaaactgctgcctgtcagcagtttctttcttttgtcatgccgccttttacatatgaatatatatgcttctgaaggagttgagcgagtgtgagcacaattcatgaaaacgtcagaagccgccaaaagaaaaccatctccctattaagagaaacgcaaaatgcggacggctcatggtcattttgttttgaaggtccgattttgacaaacgcctttctgatcctccttctcacttctcttggagacaatgataaagaactgatcgctgagcttgcagaaggcattcgcgctaaacagcgcccggacggaacttttgccaactatcctgatgaccggaaaggaaatgtgaccgctactgtacagggctatgccggcttgctggcttccggtttatatagccgttctgaggcgcatatgattcaggctgaacgctttatcatctcaaatggcggcttgcgcaacgtacacttcatgacaaagtggatgcttgcggcaaacggcctttacccatggcccgcgctgcatctgccattatctttcttagtcattcccccatccttcccgctgcatttttaccagttcagtacatacgctcgtattcatttcgtaccgatggccgtgacgcttaacaaaagattttcgctgaaaaatcccaatgttccgtctctcgcgcatttagatcggcatatgactaaaaatccgtttacatggcttcgttccgatcatgatgagaacagagacctctcttctcttttcgcgcactggaagcggcttttgcagattcctgccgcttttcaccagctcggtctgcgtacggccaaaacgtatatgcttgaccggattgaagaagacggcacattatacagctatgcgagtgccactatttttatggtgtacggcctgctcgctctcggtgtatcgcgccactcccccgttatcagaaaagcgcttgccggcacgaaagctttgctcacgtcttgcagcgatataccgtacctggaaaattcaacgtcgaccgtttgggatacggcgcttctcagctatgcgcttatgaaaagcggcatctcagataacgatcaaatgataaccggagccgcccggtttctgcgtgaacggcagcagacgaaagtcgctgattgggccgttcacaacccgcatgctgaaccgggaggatggggtttttcaaacattaatacaaataatcctgattgtgatgacacagccgcagtgctcaaagccatcccgcgaaaacgttatcccgcctcatgggaacgcggactgagctggcttttgtccatgcaaaacagtgacggcggcttctctgcttttgagaaaaatgtcaatcatccgctggtccgcctgctgccgctggaatcggctgaggaagctgccatcgatccttcaacaagcgacttaaccggacgggtgctgcactgtttaggagaagcggggctttctcctgatcaccctcagattgaaaaggccgtccaatggctgatccgccatcaagaagaggacggatcgtggtacggcagatggggtgtctgctatatttacggcacatgggcagcgctgacagggatgaaggcttgcggcgtgagccaaaaccacccggccgtgaaaaaagcgatccgctggctgaagtccattcaaaacgaggacggaagctggggagaatcctgtaaaagcgcagaagtcaaaacctatgttccgctttcttacgggacgcttgtacagacggcttgggcggccgaagctttgctgcaatacgaaaaacctcatcatcaagccgtcacaaaaggcatatcttttcttattgaaaaccggcattacgaaggagacgctttcagctatccgaccggaatcggcctgccgaaacagttttacatcaggtatcacagctacccgtatgtgttttctttgcttgcgctcagcacttttatgaaagtgagtgaaaaggaggaagaaaaatgaaacggcacgcttatcaaaccgaaatgctgaattggtgtgaaaccttgaaggaacaagtcatacagcaaggtcggttcgatcgcttcgcggcacaaatcgaccggatttttcacacccttcaggatgatggattaacggaggcggaatggtacgaacaggcatcagcactttaccgggacattaccgaaccggaagagccggatgagcgcagagcctatgtgccgatcggcaagcatgtcctccctaaactgccatacagttattccgcactggaaccgtatatttcaagagagattatgaaactccaccatactaaacaccatcagagctatgttgacggtctgaataaagcagaactggagctcaaaaaagcgagacaaacgaaacagtacgacttagtggcgcattgggagcggcaattggcgtttcacggtgccggccattatttgcacagtattttttggttttccatgaatccaaacggaaaaagacggccgacgggtgcgctctttcaaatgattgatgtgtcattcggaagctattccgcttttaaagagcaattttctcaagcagcaaaaaaagtcgaaggagtcggctgggctatccttgtctgggcgccgcgctccgggcggctggagattttggccgctgagaagcatcagctctacagccaatgggacgtcattcctttgcttccgctggatgtatgggaacacgcctattatttacaatataaaaacgaccgcgcggcttacgtggatcaatggtggaatgtcgttgattggcgggaggcggagaaacggttcgagcaagcgcaccgcgtgatgtggccgctttattaaaaaaggcccccgtcttgaacgggggcctgcttcttttggtctaaaaaataccaagcacgtgcagaaaaacgataataatggctacaggagccacataacggattaataggagccagactgcaaaccattttcgttttataccggaaccgcttttcagttcgtcaaacagcatctgtttcggaattttcagcggtacgaacacggcaattaaaagcgcgcccaacggcattaagacattgctgaccagaaaatccgcagcgtcaaaaatactgcggtgaaaaatagaaacatcactcaaaatgccgtacgacagcgccgaagggaccccgacaataaatatagcaagtcccccgatccatgcataccgcttccgttttgccgaatcgccttttgacaaaacagcaactaaaatttcaagcattgaaaaagccgatgtcagcgtcgcaaataaaaacagcagcaaaaaggcgagtaaaaacacgatgcccaacggcatttggttaaagacggtcggcagcacgttaaataaaagctgcggaccttgatccggcttgagaccgaatgcaaataccgccggaaaaatcgccactcccgccatcacggcaacaaggacatttaataccgtcaccgatacggcggattgaacaatattttcttctttttctaaatatgcgctgtatgtaaccattacggacactccgacgcttaacgagaaaaatgattgacccatcgcatataaaatggtattggcatccatcgcgccaaaatcaggcatgaagaagaattttaatcccttcgctgcatcatgcagcgtaacggagcggatcattaaaagaataaacagaataaacagagccggcatcagcacctggcttaccttttcgatgccgctgctcaccccttttgccacaactaaaatcgtcagcacgataaacagcagctgaccgaaaaccgctgcataagggtttgaaatggtatcgataaataacgtatcaaatcccgaagaaagcgttaaaccgcctgtaaagccttttataatgtagattaatatccatccccccactacgctgtagaaggataatagaataaaacacgttatgattccgagatatccgatccagtgccactttttccccggcgccagcgccttataggattcaacggcgtttttttgtgtttttctgccgataataaattcagcaagcaaaagcggcagtccgattaaaacagtaaataaaataaaaacaagcagaaaagcgccgcctccgctggttcccgctacgtaagggaacttccatattgcgccgagcccgattgcagagccggccgtagctaaaataaatcccagcttagatgaccattgattagcttctttcacttcagcactcccaattcatttcagtataaaaatcaattgtaagaatatatgtctgaatagtcaagaagatattagtttacataataattttatcgaaaacttatatttaatattgaattattcagaatattatttataatggagtacagaaaagtcagtcatattttctgactgattgattggatgtaaaaggagctgtgtttatggaatggctgaaaaaaataagcgggtttgcgggccaaacctttggcttgtgggttatcgtctttgccggtttgggattcgcctgccctgatttgttttcttggatcagttcttatatgacgattttccttggtattattatgtttgggatggggcttactcttcaagcagacgattttaaagaattaatcagaaagccttggcatgtcgtgatcggagtcgctgcccagtttacgattatgccgcttgcggctttctgtttatcagtcgggctccgcctccccgcagaaatcgccgcgggcgtcattctggtcggatgctgtccgggcggtacggcatcaaatgtcatgacgtttttggcgaaaggcaatacggcgctttctgttgcggtcaccacgatctcaacattgcttgctcctattgtaacgccggcacttattatgctgtttgcgaaagagtggcttcccgtttctttcggttcactgtttgtttccattatgcaagccgtgcttttgccgatcgtcctcggggtgattgtgaagctgttcttcaaaaaacaggtcggacaagccgtgcacgcacttcctctcgtatcggtaatcggcatcgtagcgattgtatcctctgtcgtcagcgtaaatcgtgagcatctgcttcaatccggactgctgattgtgtctgtcgtcatcttacataacggaatcggatatttgttaggattcctgactgcaaagctgttcagaatggattatgcttcacaaaaagcgattgcgatagaagtcggaatgcaaaactccggactgggcgcagcgcttgcgacagcgcatttctcccctttgtcagccgtgccgagcgcaattttcagcatatggcacaatctgtcggggtctgttcttgccacctactggtctaagaaaaaagagaaaaacagcgccgaagaagaaacggcaaagattccgttttcataactgaacaaggataggctgccgccgctcctatccttgattattctgcagatcacgaaacaggcgcaaaagcgctttttttacatccccctgaaataaacctccatgataacaaatcaattggcggatatcgtaatcaagcagccgctgcacagatcggaccgcatcatccatatgtaacgtatagtcaggattagcaagtttcagctttccgtcttcaatgacgaccgcatcacctgtgatcattgttttttcggcaggcagataaagactgatatggccgggtgtatgacccggcgtggctacaacgcgaatgcctccgcaccaaggcagcagctcaccgtcagtaactgtccggtgaactggagccgattcgactgattgaagcgagcaaatgaactgttttgcataaggctttgcatcctctggcaatgaactaaacgttgattcagcctgctcaagccgtaaagattttttagagccgtcaatatacggcgcttcacgctcatgtactgtcacgctgatatccgggtgcaaacgatgtaatgcagcgagtgagccgatatggtctatgtcgtgatgcgttacaatgatttttgtcaatgaatgaagcgacattccatgccgggcagcagcatgttgaagatggtttgtaaaaccgggatatccgcagtctattaatatcgtgtcatgttcgtcttgcagaagaaccggagtgatagaatgcaattcttcattatattcaaattcgatctcaagcggataacagcttttcatataaattctccccttcgctcaataaaaaagtacactgcttgtaagggcagtgtactttttgtctgtttcaaattatccttccagcagcagctgttccggatcttcaagcaggtttttaatggtgacaaggaacccgaccgcttctttaccatctacaattctgtgatcatatgataaagcgatgtacatcatcggacggttttcagagcgctccgcatcaattgctactgggcgcagctgaattttgtgcatacctaagatcccgacctgagggctgtttaggatcggtgttgacataagcgatccgaatgtacctccgtttgtgatcgtgaaggagcctccttgcagctcacctaatgttaatttattgtttcgcgctttcttcgcaagttcgccgatctctctttcaatgccggcaaacgtcaggcggtcagcgtcacgtacgactgggacgacaagcccttcttcagccgcgacagcgataccgatgtcatagaattttttcacgatcagctcatcgccttgaatttcagcgttaaggagcgggaattttttcaatgcagccacgacggcttttgtaaagaacgacatgaaaccgagttttacatcgttttgctcaaggaattggtctttacggcgttttcttagattcataacggccgtcatgtcaacttcgttaaatgtagtcagcatcgcagaagtctgctgcacttcaaccaatcgtttcgcgatcgtctgtctgcggcgggacattttttgcacttcgacaggtttgtcaaagctttgctgtgttttttgagcctgctgtttcggctgtgccgcaggttttgaagccggtttttcataagcttccacatcttgtttgcgcacgcggccgagcgggtcccccgtcggaatttgtgatagatcaatccctttttcccttgccagcttgcgtgcagccggagacgctaccgttctggatttcgcttctgattgtgcttcctggctgacttcttgtgcagcaggttcagcttttgcttcctctttcgtttgttcattggctggagcactttctgaaggggcgggtgcagaactttcgccagcgccttctgtaatggtaccgataatttctcctacttggacggtatcacccgaatctttcaatacctcttttagaacacccgattcttctgctgtcaattcaacatttactttgtccgtctccagttcaagcaagtactcaccctgttctacataatcaccgggctgctttaaccattgggctatcgttccttctgagattgattctgctaattcaggtaccttaatttccgccatttttacatttcccccttagtttttgcgagtcaagctatcagatacaatgcgttcctgttcttttttgtggactgtcggatctccttctgcgggactggatcgtcttcttcggccgatgtattggacatttactccttttggcgcaatttccgtcagatacgggctgatataactccatgcccccatgttctgcggttcttcctgaacccaaacgatctcttgcaggttcggcagtttggcgaaaagctccttcgtatcttttgccgggaacggatacagctgttcgattctggcaatatgaagccaatccttatcgccttccattttgttgaagtgatcgctgatatcaattgacacttttccgcttgataatacgacgcgagtcactttttcgtaagcatgggaaagaccggactgctcatagacaggcttgaatcggctttcgctcagttcctgcacttcagataccgtattcgggttgcgcagcaagctcttcggcgtcatgatcacaagcgggcggatttcctcacgaagcagcattttcgcttgtcttcttaaaatgtggaaatactgagccgcacttgtcaggttggccactgtccagttgttttccgccgccagctgcaggaaccgctcgacgcggccgctggagtgttcagggccctgcccttcgtaaccgtgaggcagcagcatgaccagccctgatttttgtccccattttgcccgtcctgcagatatgaattgatcaaaatagacttgagccgcattggcaaagtccccgtactgcgcctcccacaacacaagcgtttcaggcgaatacacgttgtatccatattcaaagccgagaaccgatccttcagagagcgggctgttatgcaccgtaaatgaagaagcgcagtcgtctaagtgatggagagcaacaaattcttctcctgtttcgctgtcatgcagcacaaggtttctttgagcgaacgttccgcgctctgaatcctgcccggtcagccggatcggcgtgccgtctttcaaaatggaagcaaacgcaagcgattcagccaatgaccattcaactttacggtcatcatcaaacgcttttgcacgtctttccaggattcttttcagtttgccgaacacgttaaaggattccggccagttgataagttcgccattcagcttgcggagaacatcaaaatcaatggctgtgtcaacgtctggaaaaccgttggacaccggctccggcaattcaatttcccgtacggcgtcttcttttttggcgggcacctttttataggcgtcttcaattcgttttgtcactgccatttcgatgttttgcgctttttcctcgctgatcagtccttcacttacgagtttttccgcaaagatccgcttgacagtcgggtgttttctgacggcatcatacagcatcggctgtgtcgttgacggctcatccatttcattgtggccgtatcgtctgtacccgattaaatcgattaagaaatctttattgaaccgcttccggtattcaaccgcaaatttaacggctgacaggcatgcttccggatcatccgcgttgacgtgaacgatcggaatttcatagcccttcgccaaatcactggcatattttgtggatcgtgattcatcgctttcagttgtaaagccgatcatattattggcgatgatatgaatggccccgcccacctgatagcctttcagtgagcttaagttcagcgtctcggcgacaatgccttctcccgggaacgctgcgtcaccgtgaattaaaatggcgagcgattttgtttcgtcttgaaccgggtaccccttttgcgttcttgtttcctgtgccgcccgcgtgcttccttccacaatcggattgatgaattccaagtggctcgggttatttgcaagcgtaatccgcgcgcttttggtttcagcatcctgaagctgtctgtctgcaccgaggtggtatttaacatcgcccgtccagccgtagctgatgccggtcgatccttcagacggcacaaggtctttattcggcgcgtgctggaattctgagaaaataatctcatacggtttgccgagcacatgcgcaagcacatttaaacggcctctgtgcgccatcccgatattgacattggttgtgcccgccttcacagactgggcgataatgtcgtcaagaaccggcacaagcgcgtctaatccctcaattgagaaacgcttctgaccgacgaatgtccggtgtaaaaattgttcaaatccttctacttccgtcagtctttctaaaacggctgacagtttttccggtgaatttttccggaacagttcgccggattcgaccatttttgtaatccatgcgcgctcttcgaaatcatgcacatggtcaaactcgaaagagatggttcttttataggtattgcgtaaatgctggatggcttctaagccgtttgttatattggcaggtgcgtctttacagatgacagacgcgggtattgctttcatttcttcttctgtaagcccgtactcggataacggaaagagctcgctctttttcggatcctttctgagcggattgacggaagcgttcagatggccataggttcgaatatcttctgcaagtttaactgctgctgcgatcttttgaatcagatctgcggtgacgcgtccctgttcctttgtttccgatgcctcttttatttggcttggcggagcgcctagttcgtcaaacatgtctttcagatccggatcaatgctgtctggatcttcagcatattggtcgtacagctccagtgcgtagccgaggttcggtccgtaaaaatcttcccaattcattctttgtttcatattattttgaaacatttgaatattacccccaacctagataatcaagtgatcaattcactatcttgaaataacttttgaacgctgtgcccaaaattatgtaataaaaacgcttccaaggatattttaccactgattgcgtttggattctaccttgattgttcacaaaatagtaaaaaaaacagatcaataccgaaaaaattaaatcattttaaaataaaaagcgaaaaagcataggaaaaagcctatcctatgcttttatgaagcagttttttcaaaagcggatacagcacatcgggcagctgatcgacatccggaacaaaaatactgtactttccgtacatatcctgaatggttttcatctgggattcttctatcgcagtattggacagaaaaacatttatgacttctatccctttttttctcgcttcgatgacagcctcgctcgtatcgacgatgccgttttgttcgtatccgaatgctgccggctctccgtctgaaaacacgattaaaaatttttgcgcctcactccgccgcatcagctgtttcgtcatttgtctgatggcgtatccgtctctgttatcttcttcaggcgcaagctgcatgatcagcggacccgcagcctgcagcagcgactcttcgaacggaatgacggtattgaagaaattcggctggctcgtttcggtcgcttcgtttgtatcctcccaaaatccgacgatttggtgagggacggacactgatttcaaggcttcatgaaaaagaacgatccctctttttgtttcatccattttgtcaaacatgctggccgaacaatcgacaagcaatgtaaaaacggcgtcaatgtctgaagacgggtcctgctttttatagaaaaggcgcgggttccgttccgtaaaatagcggatcagtttgcgattcagccggcctgcgtgaaggtcggtccgcgggagcgtttttttgtgctcaagtgttttttgtatcatctgcttcaggcgtttttgatatgattctatcgtttttgcctgttctttataagactgctcctcttcaggagacgctttttgaggcgtttgataaaccgggaaggcaaatttgttttcttttccgtcagccagcccggcgccctcatgttcatcctgaatggattcaagcgcttccagtttagagtaatcctctcttttcgtctgacgtgcggaaccttgaacggagccgagcgcctggtcaccgtcatcgccttctctggccgcgtctttcccaagatctgatttcgcgccgtgctcaatatcaaattgaaggaagctttttgacggcgcttcggtttcccggtgccacgtattcattttctcttcaaggatttcttcatctccgtcggaagactcagggagcgtgagatcgtcacttaacgaaggcgctttttttacgctttcgaataaaggctcttcagccgctttttcgtaatcaagttccggcagaaaaaagtatgtgttcagcatatctttctcaagcacttcatcaaggccttccatgaggtcttccgttattgttgcgatttgttccgtagaatccgcctcatacacccggatgagctgacgttcaatatacggtatcatcatatcaatattttcatgcatggaaggaatgccttcaagcggagactcagccgtcagcttgacaaacatcgcgcaatacaaagcgtcggtgaaaatgctccgttctaaattcaatgtcagctgcgtcgtgaaatatttcctgtacatctccctccgcttctgaaaaacacgtttcgttcccggccgttcttttttgatctgctcttcaattctgatatcctcaagcagcataaacagctgcttggcaaagctttggcgggtgaagtgccggtgaacgtcatttaaaaaccccgcaaatacccgaaatgagctgctgcgtgttccgacagcgcgcaaatagacatcgcttttcaggccggcttccatatccccggctgatcggtctttccaaaagtggctcatgtaaattttcttttcaaagggattgtagtaagactgcacgccgtattccacttcaacttcactgcttctggtcagtgttttggccagatcagtcagcatcatgaacaaaaacgaatcaatcgtgctgtcgttaaatttgataaacttcattgtatatccctcattcgaacagcgtttctgcaatatttctgacagcggctttttccctgtcgtcgtcaagtttttccacgatgcctctttcaatcgcccgtttcggcgggatgtacgcagccaagtcgcacgtatctatgagagccctgatggacgccgcttcttctgacacttgtccgttatgcgcttgtgcgattaaatcagaagacagcgtcataaagcgctcaattaatttctcatcttttaagacagactgagaggtcagcacctgtttcaggaggcttcctttaatatacggaacatcaatgatgacaaaacggtttttaagggcttcgttcagcggaacggtgccgacgtagccttcattaatcgcggcgataacaccgaatccttcgcttgccttaatcacttctcctgtaaagggatttgtcatcatttttctgtaatcaagcacgccgtttagaatcggaagggtttcaggctttgccatattgatttcatcaatgtataaaaaatgtccctcgttcattgcggttgttacaggtccgggaacgaattcaattgtcgcctgcccctgttcattttcaatcgttttatagccgacaagcgcttctgcatcgaggtctacggagcagttgacgctgtgcatcggtttatgaaaatagttcgaaagcgtttccgccaattttgtttttcccgaacccgtcggtccttttaataagatattttttcccattgtcaaagcgatgacggcatcgaatacaatcgctttatcttcggcctcatagcctgatgatccgattaaatcccggaattcttgggaaacgggatgattttgataagcctgcagtttgttttgtatatcttccggaagtgataggtgctgtaattctgaagtcataggtgatgtttcctttccatttgtattccataaccgagtatactaaaaaagcccttgtatactcaatacaaaagggctcattccctgcgggcgctttttgtcaggggagcgcaggcgattctggctccggaatttccgctcgggtttgttaaataatcgtccgtatgttcatgaatgacgaacgcgcttccgtcccggtcgagcaggctgagtctgctcccttcttttaatgaagtttgcggcgcgttcataatgacatccactttaccgtcagcccccacttcaagattggggagatctccggcgtgatgacccatcggattgttgaagccgtgttctttgttcaaagggttgaacggaccgccggctgattcgaaatcaggtgcctgacatgtccctttttcataaatatgaaatccgagagaagcgccgggcggcagatgtcccgctgatatatgaatgtctgatccttcatcatcagattccctcacttcgatatatccgatcgtttttccgttttgattgatgagtccggcatgctcacggtatgcagatgcttccaatgcgcggctttccccatgttttttgggcggagcaggagcgggtctcgccccgcagccgcaaagcgtaattgatgcgagcatgagaaaaagcaagagacgattcatgcttcctcccccttatttttttacccatcagtcttgtcaaaacgtgaaaatggtaaacaaaaaaagccccgaaaggcttttttttaaaaataactgcgcgctcctaaataagcttttttccaatatggattgcttaagtttgaaatttcaaccccggaggagcttgcgtgaataaaatctcctccgcctaaatacattcccatatgagaagggcccgctttatatgtcgtaaagaagacaaagtcgcctgctgacggctggctgatatgtttcatcgtattccaatatccggccgtgctcagacgggaaacagagcttaccttatttaaaaggtaatagatgtaaccgctgcaatcgaagcccgcaggcgtattgcctccccagcggtaaggcacgccgacatgttttttcgcctcgcctatcattctgtcaatctttgaccctgtcaccggaggttcgggagtatttggcttgtttggctttgccggtttgttacccggctgccgcacaggatcttctgtttttcccgttccgttaatcaacagaacctgtccgatttgaagcacatcagttgtcagtttatttttttctctgatgagctgagcggtgatgccgaaccgattagcaattttccagagggaatcgcctgcttttactttgtaagtggatggcttctcagaagggtttgaatgagatggcggtgttgtgccgctgtttccgttatgtgaagaacctttgatctttaatacttgattcggatacagcatgtctgatgttaattgattcagctttttcagttcggcgatggtgatgccggtttgattggcgattttccacagcgagtcacccggcttcacagtgtaagtccctgatgcgcctttatcaggctttgtctgtctgccgcctccgtccgtgccgccggcagaccctttaattttcagtttttggcccggatagatgatatctgaactcaaacggttcaggcttctcagttcagaaacgctcattcggtattttttagcgatcacccataatgagtctccgtatgtaactgtgtaagcaccagtgtttcgttttcctttttgccccgttttatgtgtgccgctcccgtcgggaatgtgcagccgctgtcctgggtggagtatcgttgatttcagtttattttccgcctgcagggctgaaatacttgtatgatattgccgggaaagcttccaaagagagtcgccgctttttacttgaatggtttttgcttcagcgggatgcacggcgaaggttgaagtcattactgcagatacagccagtccggctgcgatttttttcttcatataacgaaaaacctcctatttatcattgctgaaagggacgttccttttctttggacgccgcctgttatgcaggattcattcagaagtcgacattaattccgattcatttggtcttagatcatcaccaatgccacacattttacataaattgagaacatttcacaaaagactttggaatcattttcataacatggcttttttccgcgacattccacctttcttgtctgtttttcatacaattctcttcacggcgtgaaaatcctcccgaaaaacaaacaaaaaaaagcccgcttcctataaaggaagcgggtgacggctgattacagaacccgggtctcggcagttttcacgtcttctgctatcaattccgctgcacgctgtgctccgccggccgctttcagggattctccgatttcagaagcttttgtctgatattcaggattttcgctcaattcttttattgcttcagtgagcagttccgctgttacatcttcttttttaaacatcttgcccgcgcccgtgttttccacttggcttccgacggcgaactgatctgctcccatcggaatgacgatcatcggggttttgtagtaaagcccttcgctcgtactgttcattccgccgtgagtgataaataagtccgctctcttcaggatctcaagctgcggaacataaggctttacaataacattctcaggaatttcatcaagctccgccggatcaagatgtttgccgattgacatgacggcttttccgttaaagttcctgaccgcttttaagcatttattaaacaattccttctgattgttaaaaatcgtgcccattgaaataaacaggactttttctccttcaagctggtcaaacgggaaatcctgagccgccggcctttcagttatggacggaccgacaaagagataagaatcgccaaactcttcttctttcggctgaaacgctcttgaagtaaatacgatggtttttctgccgtcatttgagaaaatatcatacggcgttttaatgtctgcgctgaattcttcattaagccggctgaccgcttcggtataagccggataatgagatgattcctctgatataaggtttgtatttgaaaacacttctttaataaatgcttcattcattgcaaatgttgtgcaaagtgaatatgccggcagtttcagcttatttctcacaagccttcctgccagaaaatgatgatcataaaggatgtagtcgtatgattcatcttttacttcctcaagaatacggagtgcggctttttcggaagtctcaatcattaacagtaaaaactcggtagcatcccgctgttcatcacccgttgcgttttttccgaattcatcttttcggaaatcttcacattcacggaattccgctccgcttgacgcgattttgtgctcatattccttcacgccgtaatatacgacatgttccccttttgccttcagttcttttacgacgcctaaagacggattgatatggccttctcccggaaagccgatcatcaatacatttgccatctttccactccctattcttttaaattttatgtatatttaaacgataacaccaatacagaaaaaggtaaagatgttcaccttattaatattaaatgggtacaatattcccattttcttattatttcgtatgaagcgcccgcggcgaaacaagcggatacagtccgccgtctttagcaaaagacatttttcccgtttcttctgaaacaacgagcacgagtgcatcagtcacggccgaaagtcccatcgcggccctgtggcgcgtcccgtatttgagatcgacatgttttgttgtgagcggaagcacattggctgctgatacaacccggttttctctgaccaatacggctccgtcatgaagcggattgccgggataaaaaatactctcaattaaagctgaactgatctcggcatgcaggctggtccctttttgtatcattccgtccagcggatctgcacgttcaatcacaatcagcgctccgtgcttttcttccgccagatgctgcacggccctcgccagctctgtataggaaggcgtaaaatgttcgatatatgactgcaggtaaaacgacgaagcgacagcctgcatttcctgaaacgtatgtcccagttcatctaattcgcaaagaaggcattggtctttttcatccaatgtccgcagtatcattccggcatcctcggtaatttgtttcaagtacgtttgaacggcagcggtaaacgcgctttccgtcatttgagtgtggcgcatgtcacatcatctcctttcccttattttctgcatcgcgcgcatggatatgcgccgctgtgtacaccataatcatgaaaggaggcgaaatcatatggaatttgcacggctgatgcaatatatctgcacctttttaggggtcatttcactttcattcatttatgccaagatgtttaaaaagccgaaaccggataaaaaagagtaggccggctttcattgctttttatacataaaatgttataatttctctcgttaaaataaagaaacggggaacctaaattgagagaaacgaacacgatcggccaaaaggtcagacagctgttacatatcttcattccgattttaatcacacaggcgggccttgccctgatcacctttttggacacggtgatgtcagggaaagtgagcgccgccgatttagccggtgttgcaatcggttcaagcctgtggacgccggtgtatacgggccttgcaggaatattaatggccgttacgcccgttgtttcgcagctgtttggagccggcagacaaaaggaagtgccgttttccgtcatccaggccgtttatgtagcggccattctcagtgcggcggttatcctggtcggctttttcaccgttgatatgatcttgggacatttgggcctggaacctcgtgtccggacgatcgccaaacactttttaggctttttatccctcggtatttttcctttgtttgtgtacgccgttttgcgctcgttcattgacgcactcggcaaaacgcgagtcacgatgcttattacgctttgctcattgcctattaattttgttttaaattatgtatttattttcgggaaattcaacatgccggcattgggcggagtcggtgcggggctcgcttccgccctgacttactggtgtatttgcgccgtcagcttttttatcgtcttcagatttgagccgtttgccgggtactctgtatttcggaaactgtaccgtttttctccgtctgaatgcagaaaacttttgaaaatcggtttgcctatcggttttgcggtattttttgaaacgagcatttttgcggctgtcacacttctaatgagccatttccggacggtgacgattgcatcccaccaggcggcaatgaattttgcttccctcttgtatatgctgccgctcagcgtatccatggccatgacgattttagtcggctttgaagcaggcgcaaagcgttacagggatgcccggtcatacagctatatcggcattgtgatggccctttgtttttctttatgcacggcggctttcattttactgttcaggccgcaaatcgccggaatgtatacatcagatccggaggtgctcatgttgacgcagcactttttaatctatgcgctgtttttccagctttctgatgccgtagcagctccgatacaaggcgccctgagaggatataaggatgtcaactatacactcggtgcggcttttgtttcgtattggattatcgggcttccgctcggttacgcagtcggcacttacacgagcctcggggcatacggctactggatcgggttaattgcaggacttgccgcaggagctgtcggtttattcttcagactgatgaagctgcaaaagcgttatgtgaaaaaaatgatgattttataaaggaggagcagcaatgccgaaacataaactgctgtacgattatttaaccgaacgggcggaggatatcagtcagacatggtttgatacccttcatgatacggatcctgattctgtttatgcttctactgacccggctgttctcacaaatctgaaaaaacaaaatctggcgtttaattatcaactcaatcggattttttctgaagagaaggaagtatatacagcggcattggaaaagtgggcgtttgaagccgcacgggataaagaacatttaaaaactcccatccattacatcattcgcgagtttatcagagttcgtgatttgtatgtcggccatgtaaagcagtttaccagacttcattcagacaccgtgacagaagaagatgccgaagatatattccatacgctgattaaatcgtttgatgtggtcattcatattttcatagaggaaatgtataaaaacacaaacattcagcttgaagcgcaaaaagaattgattacagagctgagctcgccggtaattgtgctttttgacaatgtcggactgctgccgctgatcggggatattgacacggcaagagccaaaatgattttggagaatacgctgcaccagtgttcagagaagcgcatcacgcagctgtacattgatttatcaggcgtagccatgattgatacgatggttgcccaacagcttttcaccttaattgaatcactcggaatgctcggcgtgaaagcgacgttatccggaatccgtcctgaaatcgcccaaaccgcggtgcagctcggactgagtttttcaaatttatcaatacggtcttcgcttgcggaagcgatcgcttccgatctgacacaaaaaaagggataaggcatttcagccttatccctttttttatcagtctttccacggatatgtccaatacacttcttcttcaaaccatgtctgaagaaccggctcgttattttttaatttttcttccagctctctcagcatgccttccgtttgggtgcggtgcgcttttaaggcattcattttaatatcggcaacctctttaatatcaagaatgacatcaggcttgccgacggcttcctccctgttgcgggtgattgccatgcaaagcgtgcgcgggcggtcctcttttttctttctgtaaagcgctctgatgaccgcttcgccgcatgcatcatgatccggatggacgccgtgctccggatagaatgtgacaatcagactcggttttacatcgtcgataatctcttccatcatatccgcgagccactcgtcatcttcaaattcaagtgttttatcacgaagcccgagcattctcaggtcagtaatgtccattgctttgcatgcgtcaatcagctcttgctttcttaacagcggcagtgtttcacggttcgcgaaaaagggatctcccatgttccggcccatttcgccaagcgttgcgcatgcatacgtaacgggaatatctttttgtctgtgtaaagcaatcagtcctgccactccgtatgattcatcatcagggtgaggcaggatgacgagtacatgttctttcatgattttcacccttttctttaaactgtaaacggcttttcgctgatttgaagcgaaatcgccaattttccgcccggcagatgccccgccattaacaaacggtcttcttcatctactgtatactcagtcaaaccttctgcgtaaatccagccctcttctgttttcaaaccgacgcggtacgggccgtttcctttgattttcgcctgatggtacgtcacttttgcattgcgtatataggctacaaccgtcatatttttctcattcagatgcgctgaataagaaccggtcgttgtttccaaatggatatatacaggacgatcggcatatcgctctaaagaagtttgcacatcttcttttatgatcgctttcatagctgctcccctctttcttcttttaaaaattgcaaacgcttcgtatgtagttcaaccaattcatatttctcaatcggccgcagccgggaatctacaattcgctgcaccgccagagcaaacttttcctcgggtgacttccggagcctcggatgtgttctttgatcaagcagttcaagatcaatcgccttttccgcttcttcaagggttgaagccgggagagtgcggttattccacagtgcctgataggcttttgctatgtctttatcagtgcccattgtacagctcctttacatactcgtaatgattatacataatttaagctatcgctggaaagcgaaaggcttagcggctttttatcggccgcttccattttatctgtgaaaaggtaaacaaaagcaatgctgcccatatacaaatgaaggtaaacgctttttgcccggaaaacggttcatgatacacaaatacgccaagcataagggtgatggtcggcgctatatattgcaaaatgccgacttgatacagcggcagacgctttgccccctctgcaaacaataacagcggcagggccgtaaatacgcctgcgaaaaataggagcgcccatgttcctgcccccaaggacccaaaagtgctcccgtcagctgtatatcctaaataaataagtgcagccggggtaatcaaaagcgtctccagcgtcagtccgatcgtgctggacatgcgggttctttttttacataagccgtacagaccgaagctgaatgcaagcagcaatgcgatataaggaaccgcgccatattgaaacgcagatatgagcacggccgccccggcaatagaaacggctgctgtttgcatcttgttaagcttttcttttaagaataggatgcccaaaagaacggaaacgagcggattaatgtagtacccgagacttgcttcaagcaaaaagccgtgattgacggcccatatgtacacaaaccaattaacggaaattaaaacggaagcgaaaaaaagcgccagcaggcccccttccgatttcaaaagacgcagttcacgccatccggttttccacttcttaagcacagttaaaagcacacacatgaaaacaaatgaccataaaatccggtgagctaaaatgtccaatgcgggtatttgttcaagaagtttccaatagaccggaaacagcccccacatgacgaaagaacaagcggtataaatgattccttttcttacgttattcccttgcacggccttccccttcctttctgtaaacagattatattatatcacgggaagcttccggcgggcatatactatgttgtccgttaagaaagggtgagatgccgtgtttgattggaacagatattttcccttccaaaatcagttctctaaagaaacgtttaaaaatgctgatccgaaagatgtcgagacatatgtcaaccgagtgatggaaagcgtattcggcgccggttatgccggacagttcccttttcgcgacccgatgtccaaaaaggccgatccggtcgaagcggaaccgcccaagccggaaattgacctgtttgaaacatccgatcatgtttttgcgaaaattcccgccgaacaagaggaactcgaccgtatcaggattaagcatacgtcacacagcctcgttgtagagaacagcagcctgggagaaggaaaaaaagaaatcgtacttccgagcctcgtcaaacggaaaggaacaaaagcagtctataaagacgggatgattgaagttatgttttcaaaacaggaagactacaatctatcggaagtggagattttaagataaaaaaacggcccgcgcgatgcaggccgttttttcttaataaaatggcggataaccgccggctcccggcccgaaaccgccgtatgggacgcctccgtatccgtaaccggcaaacccgtacggatagcggggtcttgtaaaacctgtggcaatcacgcctccgagaagaccgcctaaaaatccgccgaataaaggagcgccgaacaaaaaaggacttctcgccggaaatccggcaggaccgaaattcccgcgatacaatgcatgacgagggtacatgtttttcctcctttatgtctgcctattcttaagcgtattcataaaatgaggaaattgattgggcgattgtaacaacatgtgcctctctttaatattgcattaatatgtaaacattttggttataatttgattatattttgattaactgttatactttttttacaagttacgatattataaaaccatcagggggaataaaatatgccattacttcgttttgacgttattgaaggccgggatgacgcagcattaaaaaagttactggataccgcccattacgccatggttaaagcttttgacgtcccagtaacggaccgttatcagatcgttcaccagcatcggcctcatgagcttatcattgaagataccgggctcggtttcaaaagaagcaaagctcttgtcatcatcagcattgtcagcaaagcgcgcaccgaacatcagaaagaaacgttatatcaactgatggctgatcagcttaaaacagaatgcggcatatcacccgaggacgtcatgatttccgttacagaaaacgggaacgccgattggagcttcgggctcggtgaggctcagtttttaaccgggaaactgtaaaaggcctccctgcttgttttggatgttttcaaactgaataaaagagggatggatgttggttagtgagttgtatccttgtttgatatgcggatttaaaggattagagacaagtcccgtttataacggcgaatatcaaaaaacatttgatatctgcccttgctgcgggtttgaattcggctacagtgaggaccatgacgtaagcttagggtttattgtaacgcctgatcatttaattgaagcggcatttcagttataccggaaacagtggattgagggaggaatggaactattttctccagatgatgttccggcggaatgtaaaaatgatcatttccttacattcgatgctttattaaatcaattaaaaggcttgaacctcaatctgaacaattttgatattaatggtttttatgacgattaaacattatcattaagaaaaggctgccttgggcagcctttattattcatcacatgtgtcgttggcagatcccccgggctcgcaaaaactgtctgcccatttttgcatttcctgaaaaacggcttgcagtgccatgcctttatcagtcagtttataaatgactttgacaggtgtttctggcagcacctgacgctcgacgatttcattttgttccagctctttgagccgctccgcgagcattttttgactgattgtcggtatcgtttcggtcatatctttaaatcgtttcggcccgtccatcagtacatggataatgaggccgttccagcgttttcccaaaagagaaaaagcggattccattttaggacacattgtatatcccacgtgaattcatcccttcatctatgaattgacaagttttttgtgatccattaaaattagttttcaagttacatttagtaagcttctaacttttctattatgataacacgtttatccgaaggaggaaacatgatgacatccgtattagacgttttaaaggaacgcgcatctgttaaagaatacgataaagacgcggtcattacaaaagaggaattgacagaactccttgaaatcacaacgcaagcgccttccgcctggaaccttcagcattggcattttcaagtttttcacagtgatgaagcaaaagctgccctgcttccggttgcttttaatcaaaaacagattattgattcatcagcagttattgccgtattaggcgacttaaaagcaaatgaaaatggtgaagacgtttatgctgaactggctgagcaaggcaatatcacagaagagattaaacaaacgcttttaggccagattaacggtgcataccaaaatgatcagtttgcccgcgattcagcatttttaaacgcttctttagcagcgatgcagctgatgcttgccgctaaagcaaaaggctacgacacttgcgcgatcggcggattcaataaagagcaattcgttaaagaattcgacgtgagcgagcgtttcgtgcccgtcatgctgatttcaatcggtaaagccgttaagccggcgcataaaagcaaccggctgcctgtatctaaagtgtcaacttggctgtaagatgaaagaaacccttagtccgcttaagcagactaagggttttttataggaatcgctcactgtaccaggctcgtgcctgctcggcttcctgctgtgtgagctgatgaccgccctcctgccattcaagagcaacggatgcatgagcatctgtcagatactgataaagctcctccgattcttcttttgtacataggggatcgcgttttcccgcaccgataaacacaggcagcccttccatatcaggcagcttcactccgcgtatcggcaccatcggatgatgcagaaccgctcctttcagtacatctttataatgaaacaaaagacttgctgcaatattggcgccgtttgaatagccggcagcaatcacgttttctctgctgaacccgtacatttgcgccgcttcatcaataaaattctttaattcttccgtccgttcaattaaatctttctcgtcaaataccccttctttcagccgcttaaaaaaacggggcatgccgttttccgacactgatcctctgacccccagcagacttgcgttcggatcgataaaacgtccgagcgacagaagatcatgttcatttcctcccgttccgtgcaaaagcagcagaacattttctgacgttccctgttcaaacacatgtttcatcatcattctcctttctccattatgggcagaacagctgtaatctgactgcgatgctcttccagccattccggaagcttcagctctgttccgagattttcaaaggattcatccgtcataaagcccggttcgtcagttgccatttcaaataaaatgccgccgctttctctgaaatagattgaagtaaagtatgacctgtcaagaatgtcagatgaagcaagatgagaatcagcaagaatatccttccactccgcctgctctttttcgctcgtgcggaaagcgacatgatgaactgtcccgtaaccgccggcacctgcttctttcggcgcaaggtcaacatctataatatgtccgatccttgcctccgattgcagcctgacaatttgattttcttctcctgtctttgaataaccgaagcgttctatgagaaattgaatggttgcttcaggacggtacgagtacagaagaacacctctcatgcctgtgatcgcttctttttcagtaatgcccgaaggagtccattcactctgtccgcttctttcatcttccattatggcaagcggcaggtcttctgtatcattaaagagaaggacttgttcagacagcatgatctgttcttttacagacaagccgttttcttcaagccggcgcttccaaaacgcgagtgctcctttcggcacggagaaataaattcttccggcctgcccttttcccacggttcccgggcggcttccctgaaaaggaaaaaatgtaatgatcgtgcccggctctccgttttggttgccgaaataaaagtgataagtggccgggtcgtcaaaattaacggtttttttaacgagccgcaaacccagcacttcagtataaaaccgaagattttcagcaggatcttttgcaaatgcggtaacatggtgcaatccttgtgtattcaatgtattcactcctaaatatcttgatttcgagatattaactattctaatttaatatgaatgaagatgcaactaaagtgtttcagttaaaaaagtaatagaattcttttttttctgaaaaatatcttgtgatcttatctgacacctgctatgataaggagcattatcaagtttcaggaggaaagtaaatggtcagaaaagcactaattttcgttctcatcttaatccctttcagccagctggccctgctgtcagtcgctaatcgggttcatccgatcattatcgggctgcccttttttcatttctggctgcttttatggatcgcagtcactccattatgttcgtttcttatttataggctgcagaagaaacaaggaggactggactgatgcccgcaaatataacagcattgatcattacagccgtcatcgttttaaccgttgtctgtatcggctttatagccggaagagacaaatcatcacgtacttctgttgaggaatggtctgtcggcggcagacggttcggggggctcctcgtctggtttttagtcggcgcggatctctatacggcttatacgtttttaggcttaacaagcacagcctacacagggggaagcgttgctttttttgcaatcccgtattctgttttggcgtattttatcgcttatttctttctgccgaaattgtggaaagtggcaaaaattcacaaattaacgacgcttgccgattatgcccgtgagcgttttgacagtaaacttttggccagtcttgtcgccattgtcggcgttcttatgctcattccttatatttgtctccagctgagcgggattcaagatacgcttcaggtggccggaacgggtgtcattaatgtcaatatggtcgtcatcatctcttttattcttgtagcgctgtatacttttttcagcggaattaaagggccgacgtttacggcgattattaaagacattctggtgtgggtgattatgctgtttatggtcgtctcactcccgctgatccattttcacggctggacgccgatgattcacactttggctgaaaaagcgccgcaaatgctgacgataccggactcggggccgaaaggaattccttggtttatcacagcttccatcgtatctgcgctggcgctctttatgtgggcgcatgcggcaaccggtgtatttacggcaaaaagcgcagatgccgtccgcaaaaacagcatgtttctgccgctttataatattgttttgattcttgttatttttctcggctttatcgcgtttcttgtccttccggaagataccaatccgcggctcgctttattgaagctgattcaaacgtcttacggcggagtcgcacagggatttgcttactccacgatcgcccttgcgtcattgattccctgctctatcatggccatcggagcatcaaacttatttgcgaataacttatatcgggatttgattcacccgaatgtgtcaccaagcaagctgacgatgatcacccgttcaatggtatttgtcgtcatcgggctcgcgcttttattcggtatgctgttcccgactgcgctcgttacccttcagcttctcggtgtttccggcatggttcagatctttccggctatcgccgtcagtctgttttggaagaatcaaacgaaagaagcgacaattatcggtcttctcgtcggtcttatcgtgacattcacggtaaatatcacccaatccgcccacggtatatatgaagggttttgggggttgaccgctaacatggctgccgttattatccttaacccgttttttgtaaaaaaagcgtcttcaaacgccgtcaaagacggtttattcaataaagcgccctctgataaactgaaccaaaaaggcgcttaacagaaaaaagccggcacatcgatgtgccggcttttttactttttgtgctgccatttgtaggtggcgacggttttagccgggatgacggcttcaaactgccgattttctgaaacgacatggaatttttgttctgaagatgtctggttgattacgactgtcacaatggattgatcaggattaaggaacgatacattcgagactgtgtttttggagccgtaattactttctatccgtttggctccgcgctcgataaattttgaaaagttgcctgtcatatgaaagatcgggatattccaatagcggtcagggtttttagcatcctgaataaacagcgtcgggtccggggtgcctatccaatgatgcgtcttaatttgactgtcgagcatcgtcacccacgcattgtagctcgacgcgccgttgcggaaatactgtgcgatccgatccgcccctgccgtcccccagacagaccgctccgttaagtgaatagattgatcaggatatctctttccgatttccgacatgacggaaaggtcaccgtcataatcgtgaaaagcgatgccgtctgccgcccggtttccttttttatcatctaaaatcggcggaatatagttccacgccccgctcgcattgtgatcataaatccaaattttcgtgtcaattatgtgttttttcaattcttttttcacggctatcgccagtttgcgctcctgagacggcggcatgtacatgctcggatagtcgatttccagcaaaggttcattttgaagggtcatcgcataaatcggaattccctgcttttcgtacgcctcaataaatttgcggaagtaaacggccagtgcgccgatatatttatctttcagctttccccgcttgaggttttcattcgttttcatccaagccggcgggctccacggtgaggcaatgattttcagttccggatttatcgccagcgcttccttgatggttgctgtaatgtgtaaatcaatatccttttggatcgagaaatgacggagcttaggatctgtttggccttcaggcatatcgtcatacgtataaaattcctgtgccgtaaaatcagatgtcccgatcgttatgcgcataacgtccatgccgataccatctttgggatcaaccagttttttcagcacttcttttctttttgcgggtgtcatttttgataaattatggattgtggattcttccagggacgatcctacgcccaacacactttgatagcggcgcgacggatcaatatacacggcggcggagtcagaagccttcttttttgtccatgtaagcggtgtttgttcgtctaaggcgtatttcacttccagcggcccgtcataccacgtacgggaagccggatctttttcagaactgaaccacacccttactttgtttttgtctgaagccttccgatcagccgcatacacttcggcttccgtgctgcttgatatgaaaaagaaaaacataagaaaaaccagggtcatgtgcagactttttttaaaaaacatgaaccaccatccctttccttatttttataagcgattctaaatgaaaagccggacagtcacctccttcccgttttaatgaatgcgctttcataattactgataaaaagccggcttcacacaacggtgaagccttccctttttacacctttaggatacatatgcgccgtttgtttcaatcacttttttataccattcaaatgagtctttcttaagccgcttcattgaaccgttgccttcattatcccgatcaacataaatcatgccgtagcgttttttcatttctccggttgtaaatgacacaatatcaataattccccatggtgtatagcccattacatccacgccatcatatgtgactgctttttccaaagcttttatatgtgacgataaatattcaattcttgaagcgtcatgaattgaaccgtcctcttctaatgtgtcaatggcgccgaatccgttttccacgataaataatggaatctggtagcggtcgtataagcggtttaatgtgtaccgtaaaccggtcgggtcaatcgcccagccccaatcactcgctgtaatataaggattttccacgccgtttggcaatcctccgtttaccacatccccggtattatcgtttatcacgtcactttttacggtagtggacatgtaatagctgaatccgaggtagtccactcggccatttttcaaaatctcttcatcaccgtcttcaaagtgtatctgatagccttctctttcaaattcttttaacgcatagcttggataatatccgcgaacctggacgtccgggaagaaaaagcgctgtctcatcgtttcttcagccagcatcacatcatcggggtgagatgagtacgggtaaatcgggacatgtgataccatcgcgccgatcctgaactcaggattgatttctcttcccttcgaaacagccaatgcgcttgccagcagttcgtgatggccggcctgatacatgacttcttttgcgttttcgttttctttaacggcgacgcccgagttcgtccataaaaagatcggattattcacatccatcttattattgatttcattaaacgtcatccaatatttcaccttatgtttatagcgttcaaaacacacttcagcgaatttcacaaaaaatccgactgtttttctgtttctgaaaccgccgtattccctcgccaaatgcagcggcatctcaaaatgtgacaaggtaattaccggttcaatcccatgtttcagcaattcatcaaacacccggtcgtaaaaagccaacccttcctcattgggctccgcttcatcacctttaggaaaaattctgctccagccgatggacgttcttaaacatttcaggcccagctcgctgaataatgcgatgtcctctttataacgatgataaaaatcgatcgcttcatgattcggataaaattcccgctcttcaattgtatctgttattttccggggcacaccatgcgcgcctgccgtcatgacgtccactacactcggccccttgccgcctttattccatcccccttcaaattggtgggcggccagagcgcctccccataaaaaatcttttggcaatgtccccatcgtttatatcctcctttatttgactgccgcttgcataccgaataaatgcactgcagcagcttcaagcaccgcttcgcaggtgtagaagaattcctgccttcattttcatattatacgtttacattataattgtaccggtataatttatcaatacataaacaattatagttaatttacgaaatggcttttaaaaacgattatgctataattctgaaagaagcgggacaataaatgaatgaggaatggatatgttaaaataccagcaaatcgcgatagatattgaaaaatacatagaagaacatcagctgcagcaaggggataaactgcctgtgctgcaaaccttaatgacccggtttaacgtgagcaaaagcacgataaccaagtccttagatttattagaaaaaaaggggattgtgtttcaagtgaggggaagcggcatttttgtcagacggaataaaagaaaagggtatatcagtctgctttctaatcagggatttaaagaatcacttgaagattttaatgtcacttccaaattattagcgctggaagtgagaaaacccacgcctgaggctgctcaaaatctgaatatgccgcctgacggcgacgtgtattatgtcaagcgaatccgatatattgacgggctgacattgtgtatcgaagagtcattttacaacaaatccattattacgtatttgaataaagagatcgtggcagaatccatatttgattatattagagacggtctcgggttaaagcgcggtttttcagatttatatctgtacgcggggatgttaaatgaggaagaagcggagtacttaggtctgtttacaggagcgcctaagctttgcgttgaaacgatttttcatttaaccaacggccagccgtttgatttctcaaaagtcacctatcactatgagcaatcacagtttttcattcaggcgaacagccacctttttgaacaggaaacgacataagacgggcttttcgcaaacaaaaaacaccccatgcgcgagcgacgcatcgggtgttttttactatttcatattcttatttaatgtttcaacggcttttttcatttgtgtatcgttgtccgcaagctgtttttgcagatccgtcatcagttttgccgttgtgtctcccgttaaaatacctgtttgtttcagcttctcttttgcttggaattgtttgactgcttgttcaaatgctttatcatacgtgccgtttacattcacgctgtaccccagcgctttcagcattttttgcgcattggtgacggtcgttccggaatccccgtatttgtatgtttttttcgcatctaaatacggcaggttcgcatattcaggaagcttaacctgatattgcggtttgatgccttttttatgaatccactctccgtccgctgtcagccattttgcgattgtcagtttaacggtagaaccgtcgctgtaatcttttgccgtctgcacggttccttttccgaacgttttctcgccgatcagcggaattccggatgattcatgcagcgcagccgacatgatttccgcggcgctcgcggtgccgtcattgacgaggacgactgtcggttttgtcactttgcgctctttcgtcgctttcatgacttctttcgtgccgtctttgtattcgacctgcatgatatttttccctttatcgataaacatgttgctcattttgatggcttcatccatcaggccgcccgggttgccccttaaatcgagaatgtatcctttcgctccttgtttttcgaggctgtcaatggctgaattcagctcttttgccgtcgattcggagaaggatgtgatttggatttcgccgatgtctccttttttcatttcagagtacaccgtttcaaccgggatggtgtcacgtttgatcgacaggttcagatcgccgacacccgctctgtgcagcacaagcttgacgtttgttccctttttgccgcggattaatgcgacggcttcgtttacattaaggcctttaacgcttttgccgttgaccttcaagatctggtcattcggtttaacccccgctttttccgcgggtgaccctttaatcggcgatacgatcaggatgctgccgtccttttcttccacttgtgcgccgatgccttcaaacgaagcggaaattgtttcttcaaacgactttccttcctgaggatccatataagaagaatacggatcatccagggaactgatcatgccttttatcgctccgtctactaatttgctgtcatctgttttttgatagtaatcacttttaatctgctcataggctttattgaatttctcaaatttgctgttcgtcaaagcagccgagccttgtccgaaaatggtcgtattgcccgtgataaacagcgtaagcgctgaggctgcgaccgcagtgatcaatataataaaaaacagtttaaattgccgcttcaagaaaacaccacctttttattcttacattattatcatagacgaacgctcattcgtcaacttcaaacgtgaggcgcccttctttcccgtttacccaaacctatgcttttctctcaacatatgctgaggaaaaaaggaggattcggcctttgagcaaatatttagaaatgctgtccttattcggagtcggaggggctcaccccggcgggctcgctttttccaaagccgttctcacaaaagcggctcctcctcctggcgaaccgattcttgacgccggctgcggaacgggacagacggccgcttatctcggccacctgctgtatcccgtcacctgtgtggataaggatccccttatgcttgaaaaagcagcaaaacgatttgccgctgaaggcttaaccattccgggctatttagcggagcttgagcggctgccgtttgctgaaaatcaattttccgccgttctttccgaatcagttctcaccttttcaaatcttgattcatcgctgtctgaaatcctgcgggtccttaaacccgggggcatgctgatcggcattgaagctgctttacaaaagcccatgccggaaaacgccatcacgcagataaaagacttctacggttttaccgtattgcaggatgaaaccgcatggaaacagagattgcttcagcaaggctttcagaaagcggatttcattcccgctgtctatgaaaacaatgcgcaggagccgactacagaaatggatttatcgcccgttattcagccggttcactacgatacgctgacggctcattacgagcttatgcagacgtaccgtgaatatatgggacactgcgcttttgtcgcttacaagtaaaacggcaattgtcctcctgttttcgtccaacctttttaccgcactctatcataagctgacatagaaagataggttggataggaggagaaaagatgcaaaactattatcatctttgccggcagcaccaaggaaaagtagcaagaattacagaacgaaacggcagagtccacgtcggaagaatcgtacgggtgactaacagcaaagtgtatatcacccctgtcggcggccgtcacagagggtacggattcggttattggggaggaggctggggaggctggggagcagcctacggtatcggccttggtttcattaccggatttgcgcttggaggtctgctcttctggtaataaagaaagcccgctttctatttttcaagcgggcttcttctcattacactttctttacttcattaaaatattcttcaagcgttaattgatggtcatggatggcttttgccgcttttttgcctacatagcgtaaatgccatggttcatactcatactttgtaacattttctttgcctttaggatagcggatgataaagccgtattcatacgcatggtctttcacccatttgccgtccgccgtgtttccgaacgcctcattcagctcatatccgttgcttttgctggaaatgtccatggcaagccccgtctggtgttcgctttgccccggatatgcgacggcttctttcgcctttttttcacctttcagactgacttcattatcgaaaataactttctgtctgtcataagaacggtatcctgaaacggcaaccaggtcataaccttcttttttcccggcgctgaatagttccgccaaagcatcggcggcaggtttgcggatatatcgtttctcgattttctcagtaaaagaaaattcgactttcgggattacgagatcattcggtttataatctcccggcagcgtatatgtcttatttacgagcgcaagtgtatttgtcgggttttgaatggtctcaagcccgttcacttctttaatatcattaaaatatttgctctctaatacaaaatcactgttttctgtcttcgttgtttttttgcttgatgtgtcatctgattgttttgtttcagctgctgtttttgtgtccttatggctgtcgccgtctgaaatgctgcagccggtgcccacgattgcggttacgctgagagcggcagcgagcgagaaccatttagtggatttcttcattttacccttacctttctttttttgaatcagggcgatgcataaagaagagggctgctttaatcagcataaccctcatctcaagtttacgatacagtatgcagcgccagtttaatcatatcatgaaaagtcgtttgacgctcttctgccgttgtttcttctcccgttaatacgtgatcgcttacagtcaggatagacagcgcttttttgccgtatttagcggcaagcgtatataaagcagtcgtttccatctctacgccgaggacgccgtatctggcaagcttttcgatttgggagtcttcattgtaaaactgatcggcggtgaatacgcttccgaccgctacgggaagattgtttttttgcgcttcctggtacgctttatgaagcagttcgaagtctgcgcaaggagcataatctacactgccgaaggcgacacggttcatctgtgaatccgttgaagacgtcatagccaaaatcacgtcacgcactttcacgtcattacggatggctccgcatgagccgactctgattaagttttgaacatcatagctttgaatcagttcattcacataaatagagatagacggaacacccatgccggtgccttgaactgatacttttttgccgttatatgtacccgtaaatccgtacattcctctgacttcattatagcattccacattttcaagatacgtttccgcaataaatttcgctcggagcggatctcccggcaaaagcactgtatccgcaatttggcctttttctgcgtttatatgtacactcatttccttttcctcctgcctattcaaactcccacccattgtacactgaataacggtaagagacaatcatcagcattgatcagggcaatcttgggcagaatatgcgggatgacaagcctaaagaaaaaggagtgaacataatgggcaaaaaacagcgcaaccgggtgaccggccagaaaaagaacaatcacgtgcccgtttcagacgtcattgcagctgatgaagcgcatggaaaagagcattccgccgctaaacggaagccttaacactgtctttcccagacaatacggaagccggctgaatcttcagccggctccgtcttacctcggctggacgagcagccggttaattttactccatcccgcagggttaagcctgtaataggtctttccttttcttccttcgtctatgagtatgacgtctccggtcgctatgaatctggcttgatagtcgtttgggaccgtatcaggcacattaaaaacagaaaatgccctttccagtgcgtcttgatgattgtcagcggccagctctgtccgatagacgaccctgtatccctttttctcgccgtagcggggtgtttgaaaaatcgtcacatcataggcacaagtcttttttttaaacacgggcagcgataacagcatcaagatccctccctcttatttcttaatagtattagcgttttttctcatttttcctgtctctatttttgtcgaaacggatgatacttttcgtcaaagagcgcaaaaagcgaaacgaggcaaagtccgagactgaatccggcaaggacatccgtcggaaaatgcgcgcccaaataaattctgctgaatccgatcagaatgacgagaactccggtaaagacggtgagggccctctttcttttcgtgaaaaacggaacatgcttgatcaaaaagtaagcgatgacgggatacatcactgccgaattcatggagtggccgctcggaaaactgtatgaggtttcatggacgagcggttcaaaagcgggtctggctctttcaatcaattcttttatttttatgtttacaatccgttcaatgagaaagagaagcggcaaaaaaacaacatccggcgtttttttgtacatatacagagctgcgcctgtcaaaagaagaagcggcaaaagcaccgcggtcgtgccgagctccgttatccataacatcaattcattcagccagacagacctgatcctgacagccgcttctatcacacgctcatcaaaagcccggacggcttctatccggatcgctgctgcgagcagaataaacaatgcgaaaagacttgctggcttgtacaacgttttccccccatgtttcattctcccgagctgattgaaaaaaccgaagctttttcacttcggttccgcagtttcagtcttcatcaagctcttcgtctatcatacatttttctaataaataatcaaaggtgatgtcggctatttcgaagatttcctcttcactcggtatgtacccgcgcatagcaagctgactgtaaaaataatcagctatttcttctgtgtcaatcacaagatctatttctttcatgcaaacaccgcctccttttttatgttttatgaaaaaaccgttcaaattatacccgaaagttctaaacgttttgtccgctcatatacttttaaaaaaacaagccccggagggagaaaagataatgacgaaaatgatggctttattggacggagatggatttgatatcgtattggaaaaagtgctgaaaggaatgtcgtttgtcatctttgccggctgtctgccctggtttttatatgtcaccgtccgtttttttgccggctagctgaaatgctcccgcaggctttccagcacaaaattcatcatatctttatattcttcgtcaccgaacaaatgataaagaatcttataatcgttataaatatcaagcagctcatctacaatcgataccgccagcacatgcagggcatcgggatcatcagcatcgccttcaaactgaagaagagcagacgcgacggtatcctcgccgatctcatgagatgcttccccaacatagtggacaaacagcagctgatgcacaaactgatccatttcatattttctcagaaccagcgtgagatcctcttcctccgtttcaagccactctccgtctttcagccgagtcagctcataaataatatcctcccagccatcctctaaatatctccatatttcagttctgtgaccgataactcggaataattcctttccgtagtcctttacatatacgacgtcgccgatcagaaattcatattcaatatctaatttttccatatcgacgatcacgccctcataatctttataaagctggatggacgattcaaaataaagcacttcattatgattgacttcataaagataatgtttatcaatttgatgaaccttcgtaatggtgccgacggttccgtacatcacgacgaccacgatgtctcccacttgaaatttcggtttatctggcttcatgctgtctcccccttgccgcggactgtcatacgctatcgtatgccggccgccataatttcgcatgggcatgaaaaccacaggaaatatctatttctgcacctgttcaaaatggcaaaaaccccaacatgcttgtgcgttttttcacttaccgtaacagaagcgtctgatggcattgcgctctcgatcgaatgagcagtaacaatgacgagacaaaaagcgcctgtttttgaatgagtttttgtttatttctccatgacacaaagataaatacccggcccgaaggcatgttgacaatatcaccgccgtgatgttcaaaatttgccgtgaaacacatcatcgaagatgtatggagatccaattccggctgcatatctgcaatggcttgtttatcatgaagaaccaaactcgtttcggctttcaatgaagccacaacttcaatccgcttcaaccttgtcacataaaattcccttttccgtccaaacgtcagtgcctcaccatagatcatttgattcctctcacttcatttaaatgtttgattatttctccgtgaaaagaggctccttacacgggaccccgccggcagcaggtctgatccggtgaactctgcagctatacattctgctgccttatgatccgtgccatcaggaagacttgtttacgcgctgatcaaaacgaaaggcattgcgggatttgatcatacggcacctcataagcgattgatttcaacagaaaaaaaccgcacaatgtgcggtttttcgtcaggcgtgatgcacctcggtctcatatttttcccaagcttcatcaaatgtcgccatcgtttctaaatagtcggcgctcagttctaaataagaactgagctcgtgataatcgcttgacgttttcggaaagccgtgatcttcgtatgcctgattcgcaaaccggctgattgcgtcctgcggtttgggatgcctgtatttcatcaaatagtgataaaaggatttcatgggtttcccctcctgatgactgtcttttgttgtactattatacaattcaagtgtgaaattacaacaaaagaagactaggagaagtcaaaataattccgtttcaagatccgttctgtccccatcagctcttgatatgtgagtgtttccggtaatttttttgcatcgactaaaaaaagctgattttcgatttccgctatgaccgcttcctcctgatacgtcatgccgcaggaggagcaggcgaatgcgggtgtttctgtaatttctatggctctcgtaccgtcaggaagctcccagtacacagccgcctgacaagctgacgccttctgattgccgcaccactcgcatggcttcacggcgactcacctccgacttccgatcctgctttttgctctttcttttgctgtgcaataaatttcttttctttcaattcatctctcttttccctgcggtctttcagcgtttcatgatcagggtttgatgtaaacgttttcctcctgtcgatcctcgatacattttccggtgtgaacgaaacctctttgtccgcgaaaatggcgctcagtccgacaggctcgcgtttggccattgttcccggaaaaacagattcaaaatagtcgtcagcttgattcgggatatagttttccggctcgggataagatgtaatcaccccttcgaagtttctgatcacaactttctccggactttgggagagcaagtagttcggctgcagggcgattttaccgcctccgcccggggcgtcgacgacaaaggtcggcacggcaaagcctgttgtgtggcctctcagtccttcaatgatttccaatccttttgacacaggcgctctgaaatggccgattccctctgacaaatcacattgataaatatagtacggacgcacgcggattttcactaaatcatgcatgagttttttcataatcggcaccgaatcgttaatgcctgctaaaataacagcctggttaccgaccggaacacctgcgttaacgagcttttcacacgccgcaaccgattcttccgtcagttcgatgctcgtattaaaatgagtgttcagccagaccggatgatattttttcaaaatctgacaaaggttatccgttatccgctgcggaaatacgacgggcgctctcgttccgatcctgataatttcaaggtggggaatgtcacgcaggtttttcaaaatatattccagaatctgatcgttaattaaaagcccgtctccgccggaaatcaggcagtcacggatttccggcgtttcccggatgtaagcgattgccgcatcgagctgttttttcggcacccccattccgatctgtccggaaaaacgccttctggtgcagtatcggcaatacatcgagcattgatttgtcaccagaaaaagaacgcggtcaggatagcggtgcgtaagaccgggaaccggtgaatcttcatcttcaaacagcggatcttcaaggtcatatttcgttttgtgcatttcttctgacagcggcacggactgcatgcggatcggacatctcgggttatcgggatccattaaagaagcataataaggcgtaatgttcaggggaatggtttttacagacatcctgacgccttcttcttcctcttcggtcaaatgaatgacttttttcaggtcatcgacggttcttacagtatgggtgagctgccacagccaatcattccacttttcttccggcacatctttccacaattcaatctccttccagtgacgcttcggctgaaaccatttgtttgtcaaacgaattcctccttatgaatggccaaacgtaaagttttgcaccatatattcatattttcgagcccttctgaaatgcggcagttgttcacaagcctgcctctgtagccgtatcccgcatgatacaaaacggcgttcatcccgtaagacgctgcacgggccaaggaaaaaagatgaatgattccccggccagcgagttcctgctccaacgctttaaacaagtgtgccgttacggagttccccctgtaatctgacagaaccgcgcaatcggtcatttctgcgtgccccaaaaccggattgatatctgcgcttgccgccccaatgagacgatcctgatcgaatgcggcataatagatggtgttttctttcattgtttttttaatataaaggggattaaaaacaggagtcggataggtaagaaaaacatgtttatataagtgcgttaaacggtccgcatcatcttcgtccgcttttctgaacatcagcgtgctttctgtctgagtcattccccgccgcggtgtctcatataaacggtcaacagccgaatcttctgatacatatgaatctgaccgtctccgttcctctgataaatagcgcaccatcacaacagccttatgcccgttgtaatacccgtctatggcaccctcaataataaaaagatgcttgacaaattccggctcatcgccgcgcttggcaaagaaaatcaccttttgggctccctcttcctttgcttctgccaaaacggccggtataagcgcctcgggctgtccgtcataacgaatgaccctgatccgctcgttgaaacggtctgcatcaatctcggccgctccgctttcagccctcagttcctttatcagcgctgtcacccccatctgccaccccgcaccattccatgataaaaagagaaatgattttgacggcatcgattaacgcccggacttcaatgtattcattcgcctgatgcgccgccttgacttctcccggaccgaagacgatgaccggcgtctgtcccgcgtgctgcaaaagccctccgtccgttccccacggggacgcttcacgaaccggttttgcccctttcattttctcaaaagaagattccagagcggaaatcagcggatgctcatccgggagatcattcggaagccactgagccccaaaccattctatttccgcggggtggtgtttaaaccattcatcccggtactccaaatctttcagccagcttgccagctcttcttttactgcttcgggcgtttcatccggcgctattccgcacctgccttctatcaccacacggtcagctaccgatgatggccacgttcccccttggacggtgccgatattaatgggaaccggaatcggaacgtcccgataaagcgggtctttgatacgggcgttacggacgtgttcaagctctttaagggctgtgatgacatgcaggcttttttcaatggcgctcaccccttcatagcgggtgccgccgtgtgcggacaatcctcttaccgtaatgcggaaccacatggacccttgctgcttaacaaacagctttaaattagtcggttcgggaataagcgccccgtcagccttgtagcccttcataacagccgccagtgttcccgcgccgccgcactcttcatctacgacactttgaaacagaacatctccttttaacgtaatcccgcaggcttcaagcgcttctaacgcaaacaagagggctgtattgccgcctttcatatccgttgaaccgcgtccgtaaactttgccgtccttttcaacagctgtaaacggttcatacgtccatgcggcgggatttccttccgggacaacatcaatatgtccgttcagtatcagtgatcttccgcccccggcccctttctttacggctgtgatattcgggctttcatggaagtcttcgcgttccgatacaaaataaggatgctctttcaattgtttgacactcggctcccagacatcaatatccatgtcaaactgtctcagtttttctaaaacgactgcctgtgcgttaaattcatggccgaacgtgcttttttccccgatcagccgtttcagcaggcttaccgcttttgctgtgttttcttccgcccactcagtgactttcttttctaattgatccatggacagacccccttttaagaaaacattctcccaatctgatttcggcatccgttgtttgaatgacatcgtctatggtcgtgccattcagcagttcctcaagaacaaaagccccatcatctatgctgatgacggctttctctgtaatgatgagatctgcacagcctgctgctgtaagcggcaatgaacagctttcgaccagcttcggccggcctttctgatcggtgtggctcatgacgacaaccacttttttcgcgccttgggcaagctccatcgccccgcccattccgggcacctttttccccggcacgagccaattggcgagatcacctgtcctgctgacttggagcgcgcctaaaatggtaatatctatcagcccttttctgatcatggcaaaagacagagctgaatcaaaataggaagcacccttaactgtactgacaggaaatccggccgcattgcataaaagctcatcctcctctccgcgctccggactaccgccgatcccgaggacgccgttttccgcctgcagcattacctccatgccggccggcagaaagttcggcactaaagaaggaatgccgatccccaggttgacaatcatacctgaggtaatttcactggcggcccgcctcgcgatactctctctttccgctattcccaagcccatctccacttcactccttcactttgcacgataccctccacgaaaacgcccggcgttacaatatgctcgctgtcaagttcgccggcaggcacaatttctgccgcctcagcaaatgttctttcggccgcagcagccatcagagggttcatgttgcgcgccgttttgtcaaacgtcagatttccgaattcatcagcaatatgtgccgacacaaaagcgaaatcagccgtcagcgctttttcaactaaataggactttccgtcaatcgttacggtttctttgttttcacaaacggttgcgttatcaatgccgatatcagttaaaataccgcctagccccgctccgcctgcgcgaatccgttcagcaagcgtcccttgcggcgaaaattccacctcaagcgctccgtcagtcatttgtctgcccgcgacaggatttgagccgatatgggaagcgatcagcctttttacccgcttatgaacgataagcggaccgatacctatttccggaaatccggcatcattgcagatgacggtcaattctttaacgccgctttccaaaatcgcttcgattaatgacggaggtgaacccactcccccaaaaccgccgaacatgatgacagattcgtccttgacatcggcaattgcttcatgaatatcgatttttttatgaaaaatagacatatcagctcaatccttcttcatcattttttcagcttcttctgcggactgggaaaatagatctgacagctcatccagctccgcatatgaaatcgtgaacggcggggcgatgatgacggcgtctccttctccgctgtcaataccgggctttgctgggtaaataagcaggccccgattttttgccgctttaatgattttttcggtgaaggcctgttttttcgaaaaaacgtccttcgtcgttttatccttaacgaattcaaccccgatcaggaggcctttaccgcggacatccccgatcaccccgctgcggtctttgatttcttctaatttccgcttcagcattacgcctttttcctctgactgccgaagcagctcgtgtttcttgacatagcgaagcacttcaagcgccgcccttgcacagtatgggttggcactgtacgtatgtccgctcataatgaccccggagccccgcttgatcgtttcaatgatgtcatcagacgcaacagctgccgcaatcggagcgtaaccggcgcccaacccttttccgagcaccgcgatatcaggggcaatcccccaatgctcagaagcaagcatccgccctgttctcccgagccccgtcatgacttcatccgcaataaacaaaataccgtgcctgcggcagacaacctcaagcgcttcataataacctgccggcggagtgatggccgccccggctgctccgacaatcggctctgcgacaaatcccgcgataaatgaggaaccgatccgctgaacagccgtttccagttcagccgccgcagctttcacaaattcctctccctgcagctctgaacgatacatattaggcgctgaaacggccggaaaccgttcaagcagctgggtgaagcggtatctccgttcatagaaccctgataatgaaagcgctcccaaagtaatgccgtggtaacttccccatcttgatagaaagacggatttttggtattgccctttttcctgccaatattgaacggccattttcatcgctgtttcgactgcctctgagccgctgtttacaaaaaatgaccaattcagcccgcccggcagatgatcggccagaaataaagccagttcttccgccggagtactggtgaattgcgagcgatacacaaacgaaacggagtcaagctgttcttttaaagcttgtataatatcctccgtgccgtggccgatattgcaagtgaccgcccccgatgctccgtcaagatacttgttcccctcctgatcatacacatatgatcccttaccatgactgactgacggataatttgcgtcaagctccggtttgattaaatagctccccatatctttccacctcgaaaacccatttgcttcattgtatgaacagatgaataaccgcattcttatccttcagaaagttttttgcagaaaatacctttctgtaaaacaggctgccggaaatgtcccgacagcctgaagagcgttctggaaattctattcctattgttgattttattctttcttcggttctgctatttatctgctcatcccatcatttttgatctgaatcagtataagcagaaggcggaaaattcccgtcttctttactgtatgggaatcaatatttcacacaaatgatgattcaccttttgtaaagtatacctttcgataataggctgttctctgattgataaattatttttttcgatctcagaaaaaacagtgttccaaaatccgctgactgcctcttttgtatgatcaagcaagaaaacggcgtacttccctccggaaaatgtaccgatccgggctggttcaggcacatggtcttgattgataacaagacaaacatcatagcggcatttctctttaggagtacgattcggatgatcttgcggaattcctaaaatgacagaataatcaagcagaccattcaattgcgcccagtttttaaatgactccatcagttctttgttttgctttccgccatactctccgacgtttcggaaataagcaattctggattctggtaattcttcaatcgtcatgttcacattttctcccccttctccagaaaggtaatatgtattaaaatgtttttcaagctgatttttcagcatggaaataacaaaaagcctgcagaaaatgatgttctctgcaggctgattttcattataggattttttcagtctaacaaataaaagccgcaccgacgatgattaataaaataaacaataccacgatcagcacaaaagtgctggttccgcctccgcagccgccgtgcccgtaaccatagccaaaactgccgcaaccgtagccatatccgtatccgtacatacgcaaatcatcctttcttcttacgatatacggcattgtatgcgggccaactcccaattggtttatgcgaatgcccaactatgtaagaaaataatgaaaaattgtatgcacgcgccgaaatcttttgaagccgagtttttcataaaagcggtttacaccgtccatcccggacgtcacaaggtatacggtttccatgccgttcagctttgccgccgccatcagctcattcatcaatatcgatccgtagccttttcgttggaattgatccagaattgcgacttcttctatttttgcggttttatctgctttgttgatgaaaagctctccgcagccgatcggaatcgtttgcgaggcgtcgctgtagcacacgacaagcataaccgttccctccttatacaaaggatatttccgctcaagcttttgttcggccgccgcctcgccaatgtaaagggcatcatagatgttcataatagacgacccatcggcgaggctcttttccgtcccccaagcagtgagcgggtgtccggcctgcaggtccccattttccagtttccttgcaaaaaacagctcatcttccactacgcagccctgctttaccaaagtttgtttcagaagaagcggaaatgcgtgctccggagacgctttcacatgaatataattggcttgaagcatgcccggaacggacgaaagaaacggcagcagtttgtctaacggaaatgtacggtgcagctgaacaaagttatgcgaaaaaatctgcggcaaaaaagggtccgtatatacactgaaatgctcgaacctctgaatgccggaagtaagctctatatactgcttctcggttttatcaaattgatcggtcataaaagctctccttttccttgcacatccgactgcatctctcaaccttttgttatattgagatttcttataatttcatcgtacaccggatagaacggcattccaattggtaattgtttaatttgctgaaaggaaatgggtatcgccttctgattcgcaaaaaatcgtttcgctacgtcatgactgatcggatggagaacccctctcaaataaacataaaatttccgttcaatgcgaaacagcatcctcccgggcaaatgttgaacacagtccgatgtccaccggctgatcggcggaccgtccggaagcgattgtatttcggcccgttctaaagccgggatgccatgccgtttaaatcggtaaaagcgaaatgcgctatgatcaaccagccttttctccccgtcttctataaaataaacatgaaactgatccctgacgagctgaaaattcggaatactggcggagtcctcttcctcatattgaaataaaaacggatccggaatgacgacggtccggccttcgtataacgtatgccagcgctcgtttacaggcttccttttatttcggtcaagctgatatactttctgatccgtcccctttacaaaggatccgtcgatcaggacagacggaagcgattgatacgtgttctgaaatgagtggggtgttttataggtcgtatccaacacttcttttatcggcagaaatgatgtaaatgtgttgagcctgctccaaaaaacagagtctccgtgattccaatgcataacatcttcgtcccaaaagctgccgaacttctctttcacacgctcaagcaatgatctccggtgcatcactgaacagtgatcaacgagaaaagcggcctgatcaagcacctcttcagcaaaacgatagaagtggaattgttctgttccgcgcccgtttacatgtatcaccttctggctggaatagacggcatcaaactcgctgcattgattaagcgcttccgccatgcggctgagcctattcggatgaaatacggtgtcgtctgtcaaataagtgatgtattcgccttcggcccgtgaaagcgcatcattaatcaaaacggcataccgggtcgacttcagccgttcggccggattgataaaactgttgtcataatatatgcgatgatcttttatatacgtactgatggcggccgaggtttcttcatttgaatgatcatccatcacaaacagctcccaattgctgtaggtctgatgcaaaacactttcaatcgcctgttttacaagatccggtttgttgtaactcgttaagataattgagatcttcttttccatcccatcaccccttctgtaaaacgtaaaaaacggctccgaaagagacagagcctgatatcgttattaaaaagccccccagctgacgatgcttgaaatcgcgacgtttgatctcgtattattgagcggattttgaaaaacggccaaatctgacagcacttctttgacaattacgttctgcagtgtgctgccgttaatcagattgacgcgcgacacaggaaccccaagctcttttgccattacaagctgacgccgcaaatctgaatgatctccggacggctgatgagataacaaaagaagaagaagcagtacgagctgaaattcctcctcaaaacccccgtgttttacagtttctcctgaatccaaaatattcctctccttcattttttaatctatacaacgtatgtcatactcttacaatccgcataggcaaacaaagcctgattcgaaaattcagctgtttgattaattattgaaaaaaatgcaagcaaaacggcattcgacttataccaatcttttcaatcaggaatatgaataaacgtgaggttgaaattgtaaaggaggtgtatgtccgcatgagcgaggatcgtttggagcttaaaaagaagttattaaaaactcttttagcccctgtatttgacaacagcgctttatctggcggcacagatggaggagataatgtggaaaacaaagtaaaagatttattggaatcggcaattgatgcaaaagtggatgaagcagcggcgaaagacagtctcagcgcacaatctgtattgggaagcggtatttcattagcggcgagatggatttttgcaagaattcagcccggcactgtcatcagcattgtgatggattcaggagacatgatcggcccggttcaatttgttgcctttgacgaaattcacggaatcgtttttgttacgcaggaaaattccgttacaccggcaggctctgctacaacattgcttgacgtcgacaaagttgaaagtgtcacgttcacttcgtaacagcatatgaacgttttatatatccgttcaggatataaaggcatatacacgtattttgaccgctggatcgaggaaggctttttacagtcttccgtccgctttttttctgtttctgagtttgaggaagataccatccgcagtatacgggcattcaaaccagacatcagtctgatgatgacgggagaccgtattccgtctgaatggcttcaatggctgaagacagaacagattcccgtatatctatggatgacggaggatcctttttatttcgatgtgagtatgacaatcgcgccgcttgcggatgccgttttaacgatagaacaaaacgcgcttgatgcttaccggcaaatgggcttacagcacgtatattatgtcccgatccccgttaatcagcggctttttaaaaaacaacctgctgaagcctctcttcacacaaatctgcttctgatcggatacccgtatccgaaccgcgttgaactggtgaaagcagcggcgaagcttccgtatacgcttcgtattatcgggaagggatggcgcagacatctgcctaaaaaaatcgccagacagcaaaatgtgctcgtaatggatgaatggattgaacccgaacttgccgcattatattacaacagcgcagaggtggtcttaaaccctcaccgttcttatcggtttgcgctcaatcagaacggacgcggcatcgaaaataccagtttaaatacgagaagcttagacattgcggcttgtcaggcctttcagctgacagacctttctcccgcgcccccgttttcaacatttgtttcttacagcgggtttgcggattttgcggataagatccatttttatatgacaaacccgggtgaacgtaaacaaatcgcggcgcttaattatcaagagacagtaccggcgtacacgtatgaccggctgccggctgtgcttacggctatccgttccaagactttctcatgaaacgctcttcacatcaaaaagcagcttggataagctgcttttttcatgtttattttccgcttctgtcagtcagttttctcgggtcaacctgtttattgacctgcggatgaaagccgattttatcagcgattctttcccatggcaccattttaaaattttgattggccttttggccgtgatctatattctctccgtcctgtgcgacaaaaaggccgaacggatactcaggccccagcccgaaacccagaacgtcaattccgtctgtatcgcttgtgccgtctgtttcaggcccgtctgttatctgaaagtccgcaacatatttgttctgtccctgtctttcataaatcgcgtagctgctgttaccctggcttgaggcaagcagataacctttcccgtcagcagcgtagtaaatcgtcagtccttcaatatcaggggttaaatgcctgccatcggcacgatcgataaccgttccgttactgccgccgtccggctcagcgctgaacttccagatggcctcatcttcttctgcgatataaagactgccgtattcatcgtctgctgccatcccttctgtctgagaattcattttaaacgcccttacctttttgccggatatgtatccatttttatccgcatttaattcgtattgttcaaattcgccttctttccctgtcaccatcgcgtaatattttcctgttttttgactgtggtacaagctgaaaccgtatacttcatcaattgctgatgcaatcgggcggtttggatccgtaatgctttgtaatgtgccgtttttcccgtcaatggcgtaaatctcaatggtattctttccttcagaccgattggatgccgccgcaatatcgactttttttccgttcaacggaaaatcataacggatatcaacattgttcagcttcccggtatgataggaatgaagcatctttccctctaggctgtacacgactaagcctgattttttattggttgtgatcaatttgctgttctgaggattcttggggtccagccaaatcgcaggatcatcagctgcatcaccggctgtatcaaccggctccgtttccgccgccgcattcacggtaaaatgataaggatcagacagcttatgtttggcctgggaagaaaccgcaccgcatgtgagcatcaatccggctgccgcggttaacaaaagtgtttttgaatgattcattttccatcctccttttatgaacgtgcactttaattgtaaaatacatacaggaagttcagtgttaagtttttgtgaagattgtccgaatgtgaggatttatgaagagaaaaaattgacgtgagcaaatatttaaaatgaatatttagtacaatgttttatttgtaatttctattctattaatcgggtaacgcgatatgaaagcgcatcagattaatgtttttctctaatttttgatttattggtttctttcattaactcgctgaaattgttcaacatatgatgcatggtagagaaacgagagttggaggataagccatgcctaaacagcaagcagtagagctacaaccgttttttcacgataaaactgttctcgtcacaggcggaacaggatcaatcggaagccaaatagtaaaacgccttttgctcttaacccctaaagaagtcattgtgttcagcaaagatgacagtaaacaatatgtgatgaagcaaaaatacgcggatgaacaaagactgtcgtttgtgctcggcgatgttcgtgactacagaagagtcaaccaagtgatgaaaggtgttgatattgtctttcacacagctgcgctgaagcaggttccgacatgtgaggataatccctttgaagccattcaaaccaaccttatcggcggacaaaatgtcgcagaagcggctttgctgcaagaagtgacgcatgtgattaatatcagtactgataaagccgtttattaagatacttaccacaaacaaatcaaaaaaagaagcttactctgcactcctttccaaagcagcctccaataaatgctgagcaaattgtttataaaattcatctaagtcattactcgcttcatcctgatctatatagcggatactgtaattatctttatggacaacctttattgtttttttctttaattcctcataacgttggtaaggttccaaaactacacccccgctttcacaggagtattatatgtatgtaatggttcgtctcttgactgttctttctttatcaaagcctcgcaagcttgttcaaatgtatgatccagcgttcagtaccgatctcttcgcatatgaatatgggaatgctggctttattcaaggtgcccagtaattcaaaatgtgttcttgacatatgccttctctgcacctgagtcaacaattgtcaaataaatcctggggcaggaataagccaccgcgaatgaagaatgacgtgaggtttgaagacattatttcggttcaatatgccgcttcagttttgcagcggttttctgggaatcaaagaataaatactaaatactttcaaactttgagatatttgtttttggcggtgaagattcattgaatcttttataccaaatacgaattttttgtcctttgctcaagtcatctttattgttaagttgactaagtcccagtaaaactatatccgatctatactttttaataatctctttttcactaagattttcatagtctttaacattagctttttcattatgtatgaaaattgcttgattctctccttttaaaatgacatagccgaccatggtttgctcagcctccataaaatgtttgctttgggttttgacaccctaatgttatacttaacaaaattaacagcattgtacataatctatacaagttcaaaccgcccttcttgcatatttgtaacaagagtaaaacactgttttaggaaatgacagactaaaacgactcatttttaaggattttaacaacttccccgtagtcttatggaacacggcgaggtctttaccatcatagaaccgcacaattgcatcatgaaatatttaattggctgatcaaccacaacaccttctttaagcgatctaatgtggaatatgtgtaaggaggcggtttatttgaaaaacgatcagaaaataacacttgactcttcttttgcgttatccactcttattgtcttacttattgcattgtacccgtcctattcttcttggtttgtcacaatattctttttaggatttgcactaatatacacatttgaaaaaaagagcaaatcttcaaaactaattgctattatctcttatccattatttattgttgcgtttgtttacagcataataaacagcatgtaataatcccccgcctaagacagggttattttttatcacattgcagcaacttttgggccgcctttgtctgtgatgataaagctgtcactcccgattttttcttttgatccttatcttcataaatcgttacaaggtgttttgtcataagagccgtccctgccatcttacattcctgcttatcctaaaagtaaacaattttatattcacctagaatgatcattattagctaatccagctaaatcagatgaccagccccctgtaggcaaattaaaagcaaatcctaatgtttgaacgacagcagcagttgagtatttgtcaaagttgatcgtagacgttgctttcagtatcattccaagtctgagttatctcttttcgccttaactcctgccccaaaatcataaagcaaaccactccagtaaaattccaacaatttcaatcttgccaatggtgtttcttaaacctaattccccctctgagtgttttatgatattacactcctgaaaatatttgtttttgttaaacctacagttttattgaatcttctccacggcataaaatgggcatccccaatgagactttcggttcttttttaagaaaattgtgtctcgtataataacaaaagtatgtttttaaaattcttgttccttcttttataactaaaattttttaggtaatatattgatttcattacaaatatccattatatttgtaaatatattaaactaatggttatttaaggatggtgaagaaatgaagaaaaaacttatttcatttatcatggtgttcacgttggctgtgctggctatatcagttgtttctcctggctatgcaagtgcagcagaaagtaaaaaagcacctgtagttcaaaatagcgtacaggctcctttagcttcaaatcctgaagtacatacacagggcattcctttcgctaaacaaatattagtaaaagcacttagggttggtggccccgctttaggaaaccttattaaaaagatcccatataaatgggcacaaaaagctggtgatgcttgttctaagtggggacacaaagcggcggacgttatagatgaacttacaaatttcggagaaacagctgttactgtggccttagtgaaagccggaattccattagctgatgcacagttaattgcgaaggttgttgtgttctttttggtataactatacattaaaaacaagagagtgaggcttacaaccttcactcttttgttttaattaggtaaggagagattaccatgaatctgcttgttatgacgttatcaatttatcttttatctctcatcgtcttttttatttttatgtacagaggagaaaagaaagaagctgcagaaaaaaacacaaatgaaaaatttttattatctacagtaataggagctttggttttatcactcattcctactgcaatcataatggtgataatcttatttgcaacaggatcagcaaatgtgcttgtaaaattctttgaattagaaatagaatttaaacagattgttataacaagtgtgtgtatggttgtttattcttttacttttgataatatttttgtggctgttggaaggcatctcattggggataacttcttcaagtttatatttgcctcgttgtttaggtttttatttatttatatagtgggtatcttatgttccattgggaacagcgacaattttaaattatcattaggattaactttattttttcttttgttagaatgtattttccctaaaaagtctgaccgtgcccagaatttaaaatcttaaggacgggcatttggtgagaacattaattcatataaaaaaggaataatgttcaaaaagataaagcaggcttaatgtctgctttatttaattaaaatccctcttcatacagtgctttctctaagcaattcggctcctaaagctacactgaaccttccagctttatactcgtttacaacaataaagtaacaagcaagttgagaaatctcgaatcttgatatgctcaatggtactgttgtttttgcttcctgactttgagactgtaatgggacgctttatgtctaaaaaatctgcctataatatcgtttactgtgtagtcgatataatttatattaattggcattcaattgctaataacccgctcactgaacggaaaagcatgcttttagacattaaccttgaccataacaatgtatttgttattgaaggtctgcagggaaacggattagcttactttaatctgccaatgaaaagcatcttgaaggaatcgtcgtattaataaagctaactctccatatgggattaataaacattcttatagctggctgaaagtgattatagatttaagactacatggtaaactccgcataccttcctttgaatcttggagagtataatctctctattacataactccttaatgcttagcaaaacagactgaaaattcagtacataatacaataagttatccaaatcgtttagctgtaattcaccaaaatgctcttcatattttgtgacagattcattccagtttgaataaacccattgacctcctgaaattaaatgttattatttactttaacttacaaataaaggagtgtttaatttgaaaaagttgtttagttttattgtttgcaccatggtggccattctttctctgagcattgccactgccgcatctgctgagaccgacaattctaggttttcaactaagcttactaactctgtcgaaagtgaatttaaagcttttggtcttaaccctcctaattcaaatagcgttgtaaatcttacgaaaaacaaattgacattcgctggacaagcaactggcaatacgttatattcaaacagttattttcaaggcaaatcttcgataagctattcaattacaaataatattggaactaaactaactgtgaaagtttggaatgattccgactggatttttgctactgaaacactaactgtaaatgctaacggtacagctacaggaacaataaaaaatctagatgccaatgcgctttactatctatctttctctgctccgagcgacttttctggctatgttcaataatacgtaatctagcagctccattcgtggggcttttttgtattcgttaaaaactatcgtaagagagaattggattaattgtagaaattttgatatattagtaatacaatcgaatattcaaggctgctcctacacaaaaaacaagccagtgataaaatccttcttcttattattttttatcttagtgttaaattttttcacaggggctgattttatgtttctaataaacaattcttttgactttatgagcaacgtaacaacactagttgattttgttggcattgtaggtgcgataggctctgccttgagtatttgaataaaaactatcttttatctagacttgtccagctctctccaacatttcaaagagattgtgcctgcctcaattagtttggcattgtagtcttcaacctctttctttgcgctggccaatttatcaaaagctactcgccaacaccattatgaattttgataaaagatttaatcctcaagccatcaaaacaaacatctaaaattagtctattgcctgaagtgccatcaattttgctaaacgcagcttctttattgtaccagcataaagcacctcttcaatggattcattggtaaagtactcagtttccttggttgctacataggttttcatttcttcctcttactacgtttaaaatcacgatttcatcttcggtcctagtgatcttaagtcctttctctatatatacgcagagtgtatttgagttcgcacagtatttagtgaattgtatttgatatcaataacttcaatattaattgactctgttcttataaatatatttaatagcctatcaatttcaacccattcaccattgcaatattcatcttggaatagcgttattttaatcattgtctaacccttcctttaatgaactgctttcgtctaactttcggaaaacatattaatctgctaacaaatagctcatcgactttatcattgtattcaccatattcaccagagtcccattcaacacctacagaacctcgatttgtcgtccacaatataattcccatttctccattctcaaagaccttacttgctcccctttttgacaatcgagtatatttcaacctctttcttaaaataatcacattttaagttaactttaaactgcattatgttgagaatttcacctttaattggtaagctgacatctaagtcatacttatacaaagcaggtgatatattgaacaaaataatcggaatgaccggattaattatctccttacttgtgcaagggttttcagcaagtgattcattgactcataagatcgccatggcttgtctatttttgttcttattggtttataattttaaccatactaaggagttctctaaaaagtctctggcgattataggcgcttcctttattgtgctgatgcttgggatttatcaattgctctcttttactggtgattactttgaaagtctcggtttaaattttggaattatcctcttacttgagattgctttagttattggattagtgactgctgcgctgagtttaattaagcatattgcagaccgcttaaggaaaacacctgatggtaaagagcgttgactctttgcctttttttagctaaccatttctttttatgccgtctttcttgtacaaaatcaaacgcaatatcgacttttgccggctctgttctgtcaatgatgaattgatttcagaatgattcttaattcctcatcattcattggactccgccttaatggactcttcttcatttttcaccagaattttttcaaaagatccagtcgcatttctttctttgataagagctctacatttctaatagcaagattgaatattatttgttaatacactcggccccaacttttgcgtcttagaatttgaaaggcgtacttgcacttgaacatttgtcacttcagctgatatggaatcaatccttccagcccaattaggactctctccctcgggagtcggatatagtttaaatcgccaactgatctcccctgttttggaggcaaatccttcataaccgtcgtagcttccataagaagatggctgaggaaggtggacagcaagaatactcatattcgttctcgcagcacttggcgggtataactgcactttatagattagtgccgcacccttcgcatttttcaatttttgattcaccggttcgagtactgcactacaaggcattggacttgctttcatttgagttggagagacaataacagcagccaataaaggtataaccaaaataaatcgtttcatctaaattccctcacattttttgttaattttccttactcccgccttgaatattcatcacttttgaatggttagcttcattaaaaaaaaggtgaaaaaggcagtactgaagctactagcgctgccggtaaagatggaaaatcagcatatgaattagccgttcaacaaggcttctccggaacattagatgagtggcttgcctcactgaaagcaacaggaaattgatcatatccccttctcgaacgagggggcttctatcgcattccacaccaaattgagaaattaagaaaaaacactcttcctaatatattacattatgataaaatattacataatcagtcgaaatactaggagggtgatttttttggagcaattgatctcttcttcaaaggttggcttaaaaatcaataaatggtacaaatacataagattattcagtgttgcagatgcagaaattctaaagggtgaagttgaacaagaaatagagcatatggaagaagatcaagatttattgttgtactattcgctcatgtgttttcgacatcaattaatgcttgattatcttgaaccaaaaaccatgaatgaagaacgacctaaaatttcagacttatcagaagagatcgaaagtaaacaaagcgatctaaaaggaattcttgaatattattttaacttttttcatgggatgtatgaatttgaacagtacgaatatcttaaagcaataagtttttacaaccgagctgaaaagaagatatctattgtccccgatgaaatagagcgagctgaatttcactacaaagttgctgaagtgtactatcacatgaagcaaacccacatgtctatgcatcatattgttcaagcaatagaaacctacaaagcacacgagacatactcaataagagtaatccaatgttcattcgtcatcggtctgaattatttagacatggagtatccagaaaaagcaataccgcatttcatgaatgcattaaaacaagcacaagaaattgatatgccgcggttaataggttcttctttgtacaatctcggtttatgctcatttacaacaggacatatggagaaggcattggagtattttaaagaaggcgtctcaatttatcaaagtaattctcttcacaattctagccgactgcttgacatacttctaatgttggcaaaaacgcactttaaattattcaacacggtcgatggaaaacaggtttgtgaacaaggtcttatgctttcaaaggagttgaacgatgacgtattaggaaaaatgtttgattttcttatgggtttattcgttgagaatgacaaagaacgactttttaaaatcttagattacttagaatcaaaagctatgctttcggatgtggaagacctagcgactgatgcagcaatgtattataatgtaaatgaagaccataaagtagctacagccttttatgagaaagtgctttatgcccgaaaacaaattcagagaggggattgtctttatgaaatttaaatttgcatcggcttttatctttttagttatcttacttgggcttgttggacattatcttcttgacggccacaaagtttttaaagaagcccgaagaggccacacagccagtatccatatcgcgcttgatcaccataatgacttctcagtggaacgtagagggcaaaccgcataaatgttttggcactcccgcatagggggtgtttttttatgatctgtgttcacctgtaaagctctatgcaatgctgtccttcatagtaaaacaggtaagccttattcatagctgcaaccaaaaaaagcacaaataaatagtattgctcctctaaacttgtgtggcaatcatacaaaaacacaaaaggaacagacctaaacagtaatggagaagcacttgtcacatctggatattgaccgctcatcaaaaactgtctgctcctaatcatttactttgcagatttattctgcaagtgtgtttttttatataaaagatatggagcgttatatgaaaaagtcttatgttttatatgggatttcaggagttctaattggtgcaatagttatattgttgatcaatgcattctttataaataaaggtgaacactctgtaagtacttctaaaataaatccaaccgaggataaaatcttttttatctattcaaatccactcatcaagaaaagcgtactcatatccacatcacaaggagaaaaattcaataaacgatactttaaggtaccggatataccatatatccagaaaaaaaccccctcttcagacgatatcgtcttgttagctgaacatgaaccatattattacacattaaaaaacaacactattaaagaacataaattatccaatccatttgctttttggtatcaaggagaagatatttctgtaaaagcctataatgtcgacaccaatggaaatgaactgaaagtaaatgataaaaagttcaataaaaaatatagcctgactttgcctaccctcgtaaccatgggaggaagcgataataggtatatttacgtcattcaaggaatgtctatgtacgtcattgatagaaacacagaagggattattaaaacgattggattagcttcctatggagatgtatttgatcactctgaaaaatatgttgtagctagctcagaacatgaactaactgtaatcgaaaaaggatcatggaaatcaaaattcataaaatatcctgatgatctcgaacaagcggacgctgtgtattacgacaaaaaaagcggtaaattttacgttacatatattaataaatccgtatacgcctgcttacttgagtacgataaagatttttcttttgaaaaattcgatttaaaatttccgtatatgaatgcaaagtttaaagatcaaaaactttatgtaatttcacaagaggaaaacaaaaaagggattggtggctatatggggatttttgatatccgtactaaaaagaaacttaatgaatttgatttgcctgaagaagaaacaaaagtgcaggactttatggttttagattaaacataaagaataagttgcaaagcaaaagccccttcctgaataaggggctttaattttaaattaaatagatgttttatacgcgttaatggcttgatttctcaaaagcatattatctttcgtaaccattccaagattgtatgcttgtttgatgatatctaacacttgattatcagtttcagttacagctcgtcccccagttattctggacttccagtaatcaaactggtgatttaactctgaactgcttttaaggtttttattatcaactactttgccattctccagcgcttctttgaattcattaaaaccaattgaacattgcgtattcgaactaattcctgcaccttctgtcgctaaactgcaaaacgctaaaaatttcggatctttcgtgatattgtaagagttatttagaccttccataacattcatcctctctcgaattttacaacgttgctataaatgattttcatgtttttcccaagaccttcaacttgaatctcatttgaaggaagttcgttcattggaatttcaatgtatttgtcccatcctatcacaactttgttttgtccaagtatagggtcatatttgtatatgttcgcttcacctttgtataacaaatttctcccatcctttgctttaatgacggtcgaatttgtatagcccataaagcgaactttaatatgcagcttgtcacctttcaaaacatttgttgcatttggcttgctgcttgtaacaggctcccatacaaagtcgtttccatccgatgtgacggaaagaatctgaagactgtaaagcggtgttgcttcaattgcttttgctttcgatgtgctaatggaaaacatcgttgtaacagcaagaagtgtaattgttactaaactaagtacttttttcaatcccttaacctccttggtattatttcacatgttatttatcggtaattccagccgattatttaactcaaattcaaaaaagaacctgattctaacatggttcttttcgcataggtaactgaatgggtttttaacgacatataaatgattcctgtacattaagtatgctcacttaagggaatcttggagtcttggagtcttgctcaccccctatagaaagggggtgatgcttatgtcaacatttcaggcattaatgtgaatgcttgcatttgggtcgtttataatcgccctgttgacgtatataaataaaaaatagacctcccttgagcctgataacctgaagggttaggtctatcatgaataacataacatctgagcaagccctttgatgggttgcgaccaacaccatgctctttttattttatgcatttcttgttaaagaaatacactataaccagtctgtattttacagattgattataacagattaaatgaaaccattggaatggtttgcaaaacttttgtttattggataaaatcattattgtatttggagccgataagcatctttaatgtatcaatgcgctttattactttccaaatacttctcatgttgtctttctaaaaccttaatatcctttttaatgatctcaactttatattcttctttaacttccttagataagttatcgtttagatagcgtcgtaattcttcttcattttttgttttatccataccaattgatatgactgggtctgtttctccaattccaaggctaaataagccaaattcatcccatgcactttctaatacttcctcagtggatttttgatttttaaaagaatgtgtaactgcgccatacatgaacacagaaaaacaaacaatgatcaagaccccaattaatttctttttcattgtctcctcctttcatttcaagaataccataaaatacaatacatggaaaaataattcctcagccaacagtatcctagttcattacgggttggttttgagaggataaatgctaatccgtatcttaataacgaattagattagcttaagttaccgtctatcatcgtttgtgaaagtaacctcccacacattcaccataattctcgggaattttattttaatactttaaggagttttacatattcatcttcaccaagaaataatacggttgtaaagcccttcttttcatatagatgtcttgcgtttaagttatctgtatctacaccgaatgttatttcctcaaatccaagttgtttagcataatcaatcaaataatcaacaataataccgcctatcccgcaatttcaatatccttctttaacaatcatacgagacagataaatgcgtttatccggaatggtataatctgggtcattgttttgaaaaactaacgatccttctcctataaactcgtcattcactgagtaaataaaagtaattctgtttccgcttactaattcgtcataaaacaccttagccattttctttttcttttccatgtcccaaatattattacacttatggtattcttcgggttttaatttctttacttggtacgaatccataacctctctccctttttataattagtttctatcgaaaataaaaaagctctctttctgagagcttaactttgcaatacttttcctaacaataaaagctaattgtccttaccaaagagcaattttgcaaagtcattgtctaaaacctcaatttccacatcactgtcattattatcagtttcaattggttcatctactaaacttagaataaactcttcaaaagagttggcaataaggaaaaagtctttatcggggtgacttaattcatgatcccaaaacaatatcttttcattatcgatatccatgcatatttcattcccacctgccgagcttgctataggaataatgttcctgggaaagcgatcagaataagtattgattgcttcttggagactgttatgatcgttagctaaaccatagaagctctctattaattgtgtatcatcttcctgacccatccaaggatctttctctataggtttgtagcaaacgtcatactcaacctcatctgttgtttttttactttctaaataacagcctccatatcccttcaaaaaatccttatagtcggaaggcaattgattacctatatttctttcaatttctttgagctgctcgtttgtattaatgctaggatctgtgccagcattaatcgtaaactctttcaacttttgtttgatcttagtgaagctcattttaatactccttcatatgctatggaaaaacagatatagaccttctttttagttttaatcgtcccagtcctcatcatcgatccagtcgtctttcgattcttcaagctcttctattaaaaactcttggaatgtcctagcaacttgtttaccatatccctcttggttatcccaaagaatgactgggcattctccatctatcatcttgttagtgtcaagacaataagaaaattcatctacatattcgatcactacaagaccatcggaaaggttataatattttttatattcattggtctgctcgacaacttcagcgccgtgagagtcatatccgagaatcattgttccgtatgctcccctgaaccatactcagttaaaaaccatttatagctgtctggaagagttacattgagctcctcttctatttctctaatctgatcttcagtgactcccccgtgagaattgaattttctttattttcatcaaagaaagtttttattttcgaataatccattaaactttcacctcttattcttgattctcaaattgctgagctctccatctccaataccttcttctgaaacttttatattgtttatcaagcacaggatcatttctaaaactctgtccattcccttttaatccatgcaaaacatcactgtacttattatgccagctttcaggtatctccagcatagtaccaggctcttcttgaattaagtgatgtaaatttatttgcgtgccatctttagcaaacggagcattaccatttttcatcagttgaagattcgtaaagcctttacgatttttttgattaaggtcaatatctttcattgtgtatactctacggcttacatctctaggctctcctttaacttttaccttgccgtctatttcataggcctcatacttctctttatttaaccaagggacatttactttctgaccagtaaatggctttctgctttcatccaatttctttgcactggacaaaagtccatttttaaggttttggctgttaaccacattgtatggtacgttatcagccagagcaagatcatacttagtgttataaggaagcaaatctgaaatcttaatgtccttaattttctgacctgcctgtcctgccttgtttatgaccttccccgccgcatcagctttgttaacggctcctgcgccttttgttccgacgacagccacagccactgaaccgaccgcatatgtcacccatcttgatctggagtaagcatccccgttcaccatatctttttgatacgattcctcaatagctgttgaaatggcattatacgtgttaattggatgggcaactgcccctatgataccttcaacaacttcatcaggcttgctgatcagctgccacaaaccggttaccgtgtctttcccgacatcataaaggccgacgccggctccttttaaaatatcccaggtcacttctccggcttcttccatctgttttgcttgttcaagctgcatcacatattgttgttgggaaggttcaaggttctcgtaaccgatcttcttggcaatctccaagtattcatcaggatcagttactccatcagagagctttttcttcagatccttgatttctcgctctttcgcttcttcttttttaatcgtcaaataagcatctgaatgtcttgcaatctcgccttttttcttatgtatgacactttctctgtacgccttgacgttatagtgaagtggtgttgcgtttttccctttacccgtggcattttggagctgttgaaagtctgcttggatgaaattctcgttcgcttcggtttctgcgtattccttcgttagatcatgatcgagctttccgagcttgtgtacggtattgtcccgtttcttatctgctgaatccagcttttgatcgacatcctctgtcgagaaaacatcaagatgaacaatatcgcttatctcattaagaatatccctcatttcattccgctgctcctgcatgatagcttttgatttattcttcgcattaatcagttcatgttctaaaaatgactcttccacaaacgaatcggtcaatccggcatcagatacttttccagaaatactgttaagaaaagcaatcttcatatcgatcagatcaagccagctgtctgtaacacctgcgtgatcttgaaagaatgccttgatgttatcagcacctttgcccgaaaactcattgtcatctaaatcagccattccctgaaacgcttttctgagattgataaattgttctctaatctgatcgtattcttttgcccgtttctccgctactgaaattaacgaggatgcttcaaatactttcatttacgtctcctttctgcttctttctgtctaaattttaccatagctttattatttgattaacagaaaaagacagtccgttccgactgtcatacacagttttatctcgtcctgtaataattttcagctgtatagtatttccagtcccaaaaagcatccccgttcgacataatatatcggtctaaaaatatttcaaagtttaaatttaatggattatattctgaaccactttcaaatataaatagataattaggatcaccttgattcactctatccttgtcgatcattaaatgacattcttccaacaggtagccacaggtattccattgataccttcaaacaaaagctcgtattttagttcttcttctatttcttcaaggctaaatagatgaagacctcctccaatattctcgccctctgaaagaatttcgaaaattttcgcaccattatgctgagaaataaacttcaggtaatcatcaggaagagtgaatttatgattcgactgaaagttttggatttcactaagagacgctttgtttggagaaaaagtcacaaggctctctacaatatatccctcagaacaaaacaatttaatagcccctttttcatctaaaagacttttcaaaccattgatagtcttatggacaaagttagtcaataaaaacacccccatactcctcagaataattactgaggatacgaatttgttaatcagtaacaattttattcataattgaagcagcacttgtggtgaacaaaatgtaagtgttatttgctgttttaattactatcctatccgtagagccagtttgaagtcctctgaggcttcttttttatttggtacattcaatctaaacaaaaaaccacagagcgtgtgagggactctgtggcctatagtggctgattaaacccctatgatacatcaattaggattttatcaaaacttttcttttaaagataacatcatctctgtctcaaataatgcctgcagcagctcatctatattaatttctttctgcttgtaattattcttttcataagtacgaataatttcttcatattctgatcgattatctcctttaatggagctaattccaagctcttcaccgtatcggttaatgaatagttgtttattcatttctttcgctttatcattttcataattacaaaatgcacctgacaactggacgagaaaagtttcatcttcagaatttaggttattctcgtattcaatgtcagacagaatattgtacgaatacttctgtttttacagtaaatacaataaagaggaggtgctgtttttttggagttaaaaaacatcgttcattcttacaacattacaaatattttgggttatctcagacgctctcgtcaggatatggagcgggaaaaaagaacaggcgaagatacgctaacagaacaaaatgaactcatgaataaaatactgaagtcgattgaaatcccctatgaattaaaaatggaaatcggatctggagaaagcattgagggtcgccctgtttttaaagaatgtcttaaagacctcgaggaaggcaagtaccaggcaattgctgttaaagaaataacaagactcagccgcgggagctacagtgatgcgggacaaattgttaaccttcttcaaagtaagcgattgattatcattacaccatataaagtttatgaccctcgaaatcctgcagacatgcgtcagattcgttttgaattgtttatggccagagaagaatttgaaatgaccagagagcgtatgacaggcgctaaatacacatatgcggcacaagggaaatggatttcaggactagcgccttatggataccggttaaacaaaaaaacatccaaactagtcccagtcgaagaaaaagcaaaagtcgttcaattcatctttaacatctttttaaatgggttgaatggaaaagaagttagttatacagcgattgcttctcacttaacaaaattacaaataccgactccatcaggaaaaaagcgctggaatcaatacacaattaaagcaattctgcaaaacgaagcgtatatcggaactgttaaatataaggttagggaaaaaacaaaagacggtaaacgaacaattagacctgaaaaggaacaaattatagtatcggatgcacacgtccctataatagatcaagaacaatttcaacaatcacaagagaaaattgcaaacaaagttcccctgctgcctaataaaaacgcattggaattaagtgaattggcaggcgtatgcacttgttctaagtgcggtgaaccattatctaaatacgaaactaggcgaacgcgagaaaacaaaaacggcacggaaagtgtgtatcacgttaaatcactcacttgcaaaaagaataaatgcacttatgtgagatataacgatgttgaaaatgccattctggattacctctcttctttaagcaacttagataataagactttaacaaaacatatcatttatatgatttctaaatacgaagacgtaaatagtaatgtgaaaacaaagaagcaaatgtctgaacatctttcacaaaaagaacaagagttaaaaaacaaagagaattttatcttcgagaaatatgaaagcggcatttacactgatgaactttttttgaaaagaaaagctgttttagatgaagaatttaaagaactccagattgccaagcatgaactcaatggaactcaagaagcgcaatcagaaatagacagtaatacagtcagaaacaacataaataagataattgatcaatatcacattgaaacaagcacagaaaaaaagaactcgctattaagaatggtcttcaaagaagttatcgttacgatgacacaaaaaagaaaagggccaattccggctcagtttgaaatcacccctatcctgaagtttaattttacgctttcgatctcaccgccactgatagttcctcaaaatgcagtaaatgtcttaaaaaaccgataaagccgtttccccggtaaacacaatgggagctacgaagctgttgtccgagaagctgtttcatcaggcgaatcatcatgttcaaaaccgcggtacggtgttttgttcggtccgcttcggcaatgtgctcggttcacgcggttccgttattcctattttatttgagcagttgatggcaggcggtccgctcaccattacggataaaaacatgacgaggttttttatgtcgatcgatgacgccgcaacgctcaccctgcaatctgcggcgattacaaagggcggagaaacgtttatttttaaaatggagtccctgaggcttgaagaactgcttcacgggtttgaagaatatgcgttccggcacggactgccgcagccagccgctgttgaagtgggaaaacgccccggtgagaagcttcatgaagaactgacctctcctcatgagacggaatctttatatgaatggggcaatctttacgcgatattgccggatcccgccaaacatccggaatttcggaaggtcaatctccccagatatcaatcggatcaggcgccgctcatcacaaaagaaacaatcgtaaagattattgaacgattacatgaagaaaaaaaaacatagaaaaaaggcctgtctgataggcaggcctcattgctgagctctatttttcaaataaatgcaggcaggcttcatagccctcttccttcagcttgtctttcggaataaaccggagtgccgcagagttaatgcaataacggagaccgcttggccccgggccgtcattaaatacgtggcctaagtgggagtccgctgttttgcttctcacttccgtccggatcatcccgtggcttgtgtccagtttttcgtcaacctcttcttcctcaatcggttttgtaaaactgggccagccgcaatgagaatcgaatttatccagagatgtaaacaagggctttcctgatacgatatcaacatacagcccctcttctttgtgatcccagaattcattttgaaacggcggctccgttccgttgttttgcgtgacttcatattgcatgcggtttaatgatttgattttttcttctttattaaaagccatcttatctgtccctccaatgctcatccagaaagccttgacgtccggaacctacacggtagcgcccgtagtgatcaggatttttcttataaaagtgctgatgatagccttccgcttcataaaaaggctcagcctttaaaatgtctgtgacgatcggctttttaaatatgccgctttctgcaagctgtttttttgaggcttcagcgatttgtttttgttcatcattatggtaatatatcgccgcccgatatgaacttccgcggtctgcaaactggccgcctgcatcagtcgggtcgatctgctgccaaaacagctcgacaagcttttcatacggataaatgtcaggttgaaatgtgatttgaacggcttctctgtgtccggtcgtttcactgcacacttcttcgtaagtcggattctcagtatgacctcctgtatagccggacaccaccttttcaatcccgggctgttcgtcaaacggcttcaccatgcaccaaaaacagccgcctgcaaatgtggcgatttcttttttttctgacatacgggtgccctcctttgttcatacgtggtattattatattatagcatgtataaacagaataaaaataattctgctctcaggagaagctgaacgaatgccacgctgactacatattggaggttcatgatttgaaagtaaggacacaaatgatgtatgatatggaagctttgcttcgaaaagtgtttaaacaaatcagaaatgaagttaatgaaattctagataaagagctgtccaggaacgaattcaccattttgcggattctcagtgaacaagggcctaaaaaagtaacggaatttgcccccattcttgaggtctccgcaagccacattaccgcagtgaccgatgctttagtagaaaaggaatggatcacccgcatccgttctaaagaggacaggcgaattatcagaatccatattacggaagccggggagaaaattgtcgatcatttcaaccagaaaaaaacagaatacttttttaaacggtttgactgctactctgatgaagagcttgcaacgttaatcaaactgttcagcaagctagacaaaaaacgctgacacaaaaaaacacaaatccctgaaaggatctgtgttttttttatgaaaacttattgtttcggatgataataggaaaattcaatttcatccgtgtcgagattgattttatccgcttttacatacatgccgttgtctaaaggcatttctgacagacggatctcgatgcttttatccccggaatgaacgtgcacaaatgacgggagttcataaaagctgtccatataattcagcacaaagctgattggcaggcttaattcacctaatgaaaacttcgtcactttcaaaaccacatctccgttctcctgtacggacggttcaaatgtgacgaccgcgttaatggaggttgagaatgctttgattttacctgccacgtgcacatcgttattgatgtccactttgtagtcaagctgattcgatgccttctcttttaagtacgaattcacaaacctggcaagtgattctttggagcttgtgatatgaaagccgtactcactttttgtctgatcttgtattttcgcctgttctcccggcataaccaataatgtcacaattaccgcggcggcaatcacattgagtgcgagaagaacaaaaaacagcgatttccattttttcatcatttcaccctattctgctggtaacccttgtttttctatgatgccgtataatcggtcggcgatgagtgcatacccttttgcgttcggatgaaaatcatcatcctttgaaatccgtctgctgccgcttttttgactgaacaagtcttcaacattcaccgcagcggcgtgaggatctttttccagctcttttgcggcgatcttgttccaatccgtcacaaccccattaatttcttttaattcaggcagcgtaaacgtgaatggattatacatgctgacatacaccagctctgcgttttcattatatttgcggatttttgaaatgatcgtcttgaaccgtttttcaaaaggtttctcttccttttggaacggctgaaccgtcagctgcatcatattctggcggagcaccttcattaagtcattgccgccgatggtaaaaaagatatagtcggcgctccttaatgatttctgcacttttttattatcaagctttttcagcaggtctgacgttttgtcgccctgcaccgcataatttttaatatctaccgttttcacatgtccctttttcttaagagactccgctgtcttgccgacgtatcctgaaccgtcaggatctcctactccttcagtcaatgaatcaccgaccgcagctatgacaatatgatctttcgttttcggttcttcagcgtcagaaccggtgcgctggacagaacaagctgataaaagcaaagccagtccggcgatcaatgagaacattcgcagcttcaatctggttgctccttccccgtctactagtggaaagtgtaacatgttttttcagttttgaaaatgtctaatctgccagtttacttgagctcctcagccgctttgacatctgagaggatatcatcatacggaaccttctgcacgccgtcataatctttaagcaccttgccgtcaggtccgactaaataaaaagaagtttgatgtatgacctgatcctctccctccggctttttgacgattgctttaaagctgttcagcgcaaaatcttcaatgtccttttggctgtaaccggtcagaaaatcccagttgcgaagcgaaagcggatatttggaagcaaaggctttcagctgtttcggcgtatcattttcaggatctacactgaatgacacaatccgcacgtccaggttctcagccttcagttttttttgcagttcggtcatgtgggccgtcatcggcggacagactgtattacagtttgtaaacataaaatcggcaatccagacatgccccttcaggcttttcagtgacactgttttcccgtcttggttctgatatgaaaacggctcaatctgatagttcagcgggtcttttatcgttttccccccgcaggcgcacaagagcagcaaacaaaagacggcagcgaagcttttcatttttttcatttccattccccccatagataaaacgcttacagcgttcatcataaaaaaattcccgcaccctcccttatcaaaaggaaggcgctaaggaatgtgcaccgttatgcgttatgttttaaaatctcttggctgaaaacggcctcataatctttccacttcatacggcgcttgacatattgtcggaatgaatacactgttctcacactttgtgaagcaaaaacttctctcaaataaagctcaaggtgctgatgaatttgaaaaaaatattgttcaccttccgtgataaccggtatttctgtcacttttacctgaatcccgtcctgtcgtttgaactctaggcttttgagtaacaagatatcaatccttctttttcgattgttttctttttattatatacaatctgagaaagcgtgtctgtcattttgcgcggccgttctaaaaaaagtcagattaacaggtggaacagatcctgatctttattcacctctacgtaatgaaatcctttttgattcatccgggcaatgagcgcgccgtaatcttcccgatgcttaagctcaatgccgaccaatgcggggccgctgcttttgttattttttttcgtgtattcaaaccgggtgatgtcatcatcaggaccgagcacctcatcaaggtattcgcgaagcgctcccgccctttgcgggaaattaacgataaaataatgctgcagcccctcgtaaatcatggagcgctccttcatctcctgcattctgccgatgtcattattccctccgctgaccatgcagatgacgtttttccctttaatctcttctttgtacagatcaagtgctgacacggacaatgcacccgccggttcagccacgatggcgcattgattatataattcaagaatcgtgctgcacacttttccttccgggacaagcaaaacgtcatcgacgacggtttcgagcgtttgaaaggtttcagcgccgattttttttacggccgccccatcgacaaatttatcaattttctcaagttcaaccacttgtccggcttttttcgattcaaaataggaggctgcgcccttcggctctaccgctatgatttttgtatccggcgagatgtttttcatgtacgtgccgatcccggacaggagtcctcctccccctacgcttgcaaaaagaaaatgcggttcgacgtcaatgtcatttaaaatttcgatggcagccgttccctgtccggccatgacatcgggatcgtcaaacggatgaataaacgtgcggttttctttttcacagcattccgcagaactcttatacgcatcatcgaaagtgtcacccgtcaatatgatttcaacaaattcttttccgaacagttccacttgggatactttttgtctcggtgtggttgacggcataaaaatcttgccgtgaatgccgaggtgtttgcatgaaaacgcaaccccctgcgcatggtttcccgcacttgcgcatacaattccgttttcagtctgctcttttgagagctgcctcattttattataagcccctctgagcttaaatgatctgactacctgcaggtcttctcttttcaaatagatattgcagccatacctctcagaaagtctgtcattcctctgcaaaggcgtatgtatcacaacgtcctttacgttttggtgcgcttttaaaatgtcttttacctggatgagagagtcttctttaagcaacggtttcatttacagagtcctttcttatttaaatccctatttaatatgccattataacatgaatattcaaacaataagataattattttaattttgtaaataaaaataaatgaaccgatacaagagaaaaagatattttcgatcgcataaacgtgttatacttaaaccaattagaaccaaaaggagccaatttatgagtgtaattgaacaaactgatcctttttatcagctagccggcgaacatcacaccttttcagaagcgaaacgattggcctcgcaatttgccttatctgatttgccggtcttcataacgggtgaagtcggaaccggaaaaaaacaaatggccagagcgatccatcataaatcccgcagaaacagcgaactatttattaccgttcactgcagtcaaagcgaagagcggctcgaatatgaactgttcggggctgaaggcgcattaaacagggcccgccgcggaacattattcttatatgaaatcggagacatgccgctctcggtacaggcccgccttctttccgagctggacgccgggctttccgcccgcatcattgcaagcagcacggcgaatcttggcgataccggcgcggaaaacacgttcagcatagatttattttacaggcttcacgtgttaggccttccgctccctgctttatctgaacgaaaaagcgatataccgcttcttctgcagcatatgctgacagcctcggggcagcatgttcatatcgatccgtccgtttatccgctgtttgagcggcacacctttaacggcaacatcagagaacttgaaaatgcggcgcactatatggccgcggcagcatccggcagcacgatttatcccgagcatgtcccgccgtatatcaaaaacagccagaaagcgaaaaccgctaagaaaaaagaaaaacggctgacattgatggagaaagaagagtttttgtttattttggaagcaattaaagacttaaatacaaaaggcgaacccgccagcagacggagcatatccgaattaagcgaaaacagcacaatgacattaacgccccagcaagtcagaaacaggcttgattacttagaaaagatgaactatgtgacaaaaggccgaggacgcgcaggaacaaaaatcacattagaagggttgacctttttgcagtcactgcaaaaacaaatcctttaaaaaggaggacatttgattgttcacaataaaagaagaaatcgcaaatgccgtcacacacggaatcggtgtattgctgtcgattccggcgcttatttttctcattatctttgcggtgaaatacggctcgccgacagacatcgtcagcttttccatattcggcgcttcaatgctcctgctgtatctcagctcgactcttttgcacagcatccagcataaaaaaacgaaagacattcttgaaattgtggatcattccgcgatatacgtattaatagccggaacatatacgccatttttattaggaccccttaaagggacgctcggtctgacccttttaattattgtttggtcgcttgccatcggaggcatcgtgtttaaaatcttttttgtgaagcggtttatcattttttcaacgcttgtctatttaatgatgggctggctgatcatcatcgccattaaaccgctgtacgcttcgctgtcaggtcccggtttcggccttcttcttttcggcggcttattgtattccgccggcacaatattttatatttggagaaaagttccgtatcatcacgccatttggcacagttttgttttaggcggcagcgcctcgatgtttttctgtattttgttttattgcgtcaaagttccctttatctgaaataaaaaagcacagcctctcgtatagagactgtgctttttttatgcacggagccgtttctgaccggccggataataagcgggctttatatgtaattcaatatcagccggtttcagccgtttcaataacctgccccgcagcagccggtctgttcccgaagtgctgacgggcacaatcgggagatcgaaacgaagggccagttcctccggattgattttgccgtcttcggacagaatcagactttgccctttttgcagccggacttccgcctcctgaagcactgcatcccggctgtctccgccacaaatgacacccatcagacgcagccaatttccgagaaacggcatccggaaagctttctcgccagcgataaaaccagccggctcttcaagatgtcccgcaagcagcagaagatcagccgggcgcaatctgggatgcacatacaatacggggccgtccggtatcggctgatcatgatgaatgccgattgccgatcccgacacgtcaatgcagcctctcataaaggctttcggccgctcatacaccagcctcatctgtttttgaaaagagagccgcgggtcaagctctttttgattgatatattcctgaatatttttcatgaacataaatacaacgtacatcacaaggcagccgtaacgaatcaattcttgtccccctgcttaattctttttctcgtatacaaggtactcataatcgtaagggtttttttcatcttttactccctgtttgcgggaggtcaattcccattcagcttcattaaattccggaaaaaaacggtctccttcaaagacatggtgaatttttgtcatgtaaagtctgtccgcatagggaaagagcgcactgtacagctgggcaccgccgattacaaagcattcttcatccgccgggatcagcttgagcacttcctcagccgagtcggcggtaatacagcccgggaatgaagattcgtcccgtgaggttacaacgatgttccgccggttcggaagcgggcgtccgattgattcaaacgttttgcgccccattacaatggtgtgacccgtcgtcacttttttgaaatatgcgagatcatcgggaaggtgccaaggcagatcgttatcttttccgatcagccggttctcatccatcgcaaaaataaacgaaatcatacgctgacagctccttttatgtgcggatgcgggtcataatcctcaatgataaagtcttcaaacgtaaaatcaaaaatagaatcaacatttcgcgcaaaccgcagtttcggcagcggacggacatcccttgtcagctgcaaattcacctgctccacatggttttggtaaatgtggacgtctccgaatgtatgaacaaactcacccggttcaagtcccgtcacatgcgcgatcatcattgttaaaagcgcataagacgcaatattaaacggcacgccgagaaagacatccgctgagcgctgataaagctgacacgacagttttccgtccgcgacataaaactgaaacaggcagtggcagggcggaagcgccatatgatcaatttcgccgacattccaggcgctgacgattaaacgtctggaattcgggtttgtcttgatgtcatgaatcagccgggagatttgatcaatggtctcgccgtccgctccgcgccacgaacgccattgagagccgtaaaccggtccgagttctccgttttcatccgcccattcgttccagatgcggactccgttttcctgaaggtagcggacgttcgtatctccttttaaaaaccaaagcagctcatgcgcgatggacttaaaatggagctttttcgtcgtaagcatcgggaaaccttcctgaaggttaaaccgcatttggtagccgaacgtgctgatcgtacccgttcccgtacggtctccttttttttctccgttttctaacacatgacggcacaaatctttatattgtttcatttttttcatccttttaaagtagtcttttagtagtgtaacacaataaaaaatcatttctgcaaaatttctcagaaatgatttttttatttcttctcgctattacacgctcatccagtcaggcggcgtattgcggtcccagtaaatgctgccgagctcatgatgtgattgaaatccgtcttcagcggtatggtaatgaaaattaaaccagtagccgtcttgcggaggatgatcccggcggacgtggaaccttaaaagatcttcacctgtcagcctgttatacacatgaaaaattttttcagtttttccggccgacggtttactggaaataaccacatcctgatacgcttcatcatcttgaaacttggctaaatgtcctgtgatgacatcttcgattttcggcagaatttcacttctgtaatcatcttcaatgaccggagagattttgctgccgaattttaaaaatgattgattttcagcatcaccgagaagctgctgctgatacgattgaaacagtaattcaggctcccgccctgccttcgcttctcccgtcagggcgtgttcatcataaaaagcggtgtaatcattctgctcaagactgctcgactgtcctgaaggcttgtctgtcatcaaagcagccggaggagacacgagtccgaacgttacaatggtaaacagaaccacaagggtctttttcatccacaatttcatgatagattgttcccctctgttttattgtcctcttttcctttattttagcatagattaaagcgcggcgtcatgtccggcaccgtattatcatgcaatatgggaaattggtaactgtgaccgagtggataaaccgcttacaataagaaggagaaaaaggaggggatgagatgattaacgctttatttgcgactgtatcacttctcacgctgctttattttgtcgttatggaaatcactgattaacgaaaaagaagcccatgatatcatgagcttacatggatgacaccgaagtggaaaagcgccgtctttcttttcagcaccttgaagccgtatcgttcaaaccgcgggcttttccaatggtctttaagcactacgcattttttcgccgcccggacggcttgcgtgatgcactcttcgttaaaaccctcttctgccagcgcgcggagcggtgcaatgccgtctgacgtttcaacaggttcgtgaaacatcgggtcaaaataaatgacatctaccgatgaatcaggaagctcccgcaaataatcggcgcagtcggcatgtttaacctgaatgcgtttcatggcggtttggagctgctccattccggtttcccacgtttgaagtcctgtttctacaagcaatgagacaagcttgtttttctccaggccgatgacttgtccgctttttccgactgccaggcttgccaaaatcgcatcggatgccaggccgagcgtacaatctaaaaaggaatccccctcgcgtaatccggctgcttttaacaacggctcggcttcccctctcaaaaaccgctttgcgcggaacatcgctgtattcgggtgaaaaaagaacttctccccttgcttcgtgtaaagttcgaaccgttcctttccgatgactaaaagatcgctagcggctcgttccagcattttttcaatgggctgtttattgcggctgcagtaagtgtcacccagcctgacactgagtgactgcgctgtgtgtatcgtgtattcgcttggtctgtaactcgttgtgatcatctttttctccaaaaagaaaatgcccggaattcgggcatttcagcagtgcgcatcgaaggcatccgtcagatttttcataatttcctccatgtcatgcccttcgatttcgtggcggggaataaaatgaacgacctctttcccttttaacagcgccattgatggcgaggaaggttcctgccccgtaaaatattcacgcatttttgcagttgcgtctttatcttgaccggcaaatacggtaaccgtatgatcaggcgctttttcatgctgtaaaacagcctgagtcgcagccggacgggcgagaccggctgcacagccgcacacggagttgacaacgaccaatgtcgtgccctctgcctgttccataaagctttctacttcttcagcagtcgttaattcctgaaaacccgcacccgtcagctcacggcgcatcggcacgaccagctggcgcatatattcttcataagccattgacataaaaaagccccctctaaaaatccttatatgaagtcaaggatactatagagggggccggaattcaattgttcaggcctctgttttatattttcatgattccgcctgtattggcgcttgttacgagtttggaataccgggccagatatcctgtttttactttcggctcgaagcctttccattcggccttgcgtttttcccattcttcttcaggcacttgtacgtccaaaatccgtttttctatgtcaacgatgacatggtcgccgttttctacgaatgcgagcgggccgccttcagccgcttcaggtgatacgtgcccgattgaaagaccccgggacgctcctgaaaaacggccgtctgtaataagcgccactttcgggccaagccccattccgacaatctgagacgtcggagcaagcatctccggcatgcccggtccgccctttggcccttcataacggataatgacaacatctccttcttttactttgcggtttataatgccttcaagcgcggcatcctgggaatcaaagacgacagcgggccttcatgtcttgtaatcccgtcctgtacgccgcctgttttgataatggcgccgtccggagccagattcccaaacaggacggccaaaccgcctttttcggtaaacggattgtcaagcggatgaatcacgtcataatcctttacttcatgacccgcaattgtttctccgagtgtgcggcctgttacagtcagcgcgtcaagatgaagcgccccttcttttttcgccaattcattaagggccgccgagactcctcccgcttcgtgcagatcttcaatgaagacgtccgaggccggcgccaatttcgataagtgaggcacccgttcagccacttcgttaatgcgttctaaagagtactcaaccccagcttcattggcaagcgcaagcgtatgtagcactgtgttggttgagccgccgagagccatgtctaacgcaaaggcgttgtcaatcgctttttcggtgacaatatcgcgcggcttaatgtcttttttgatggtctccatcaattgggccgctgattttctcacaaactctcttctctccggtgaagttgccagaattgttccgtttcccggaagcgccagaccgagcgcttcagacagacagttcatggagtttgccgtaaacatgcctgaacaagatccgcacgtcgggcagccgaactgttccagctcctgcaggtcgctttcaccgattttcccggcttgatatgcgccgacgccttcaaatactgaagaaagcgaaattttgcggccgtcgcttgtgcggccggctgccatcggccccccgctgacaaaaatggtcggaatattaatccgcatagccgccatcagcattcccggcgtaattttgtcgcagttcggaatgcagaccattccgtcaaaccagtgcgccgagacgaccgtttcaactgaatcggcaatgatttcacggctcggcagtgaatatctcatgccgatatgccccatcgcgattccgtcatctactccgatcgtgttaaattcaaaaggcacaccgcccgcttccctgattgcttcttttacgatttttccaaattcctgcaggtgaacatgcccgggaacgatatcgatgtatgaattacagaccgcgataaacggcttgccgaagtcttcttcttttacgccggcagcgcgaagaaggctgcggtgcggcgctctgtcaattccctgtgtgatcatgttgctgcgtaattctgccatggtgatcccctactgtttttagactgtgcactatttttaaaattttcagtttattctagggcgcgttctgcaaattacctgtttacagcgtctttgccctgtctcgcttttctattctttctgtatttcgataaaaaccctccaacaattaatattgtacttactatatagagttttgaatcatttttcaacaatattctaaataatttttataaaaagtgaattcaaataaaaaaggtgcatggcgcacctttttgttataactgttctttttttctgctttcagtcatctgtttccagactgaacctttcgcctcttctccgtgctcaatccgttcaatcgccattttgacttgcaggctgacttcgaattccggatcgtcttccgccgcttttaatgcttccagtgcgctttcatcgccgacttcatataaaaacatggccgcgcgccagcgcacgagcttgcttgagtcactgagcgatttcgtcatagccgggatggcgctcgcatcgccgagatccgacagacagtcacccgccgtccttctgaccgtcaccgttttgtcttcaagcgctttgtataacagcggaagcacagacggcttttcgatcattcccaaataaacgacggcttgtcttctgatcgaagtcttcggatcatgcagcgccttttctaatactggtaaatcgtcttcatccggatccatttgctcaagatgggcatagcgctgtttccagtcttcatcatcgagcatttccaaagtcactttataagctttccgctgcactgccggtttggcctcacccttttgctgtacggctgcttctgtcaggcgtttgagccgctcatcactgtaggcggcctgaagctcttctgtgacatcgtgtccgatttcggtaaaatccccgaagcgcacgccttgttctttccaagcccgctcaaatacaacatttgaagcttcggaacgcagctttaagatggcttcttggaaacgttccggaaggccgaagcgctcttcacgttcgccgtccgtcaatttgacctgcatcgggattccgctgaacatttgtacgaaaaccttcacttcaccgaacgattcctgttcagaacggctctcagactgctccgtatgttccattccgaaagcggaacggacctgaggcagaatgtccttccagtcaaaacgggcgtttctctccacagccaggaaatcggcaacgtgataaacaccctttactccttcaatgtttaaaatatcacgtacgacggccggagcatcatctgcctgatcaggcttgtaattgttgcttttccccgccggaagctcttcagtcaaaatcactttcatcgtgttcggactcggcgtcggttctattgatttaatcttcatattggtcctcctatgcgcaatctgacacttattctaacatagtcggcacaagcgttctattgcgccgcttagcttttgccgatgccggcctctttttggatacgggcggcgaactgcaaaagaaattgatgccgctcctctgctaaacccgcccccgcttttgtattcattaagcctttaagcttgattaatttatcctctatatgggccagcacacttgtttgagttccgtacatcgggtgacccttcgcgccggcaaacataaaagccctgccgatgcccgctgcgccgatcgcatcaagcatgtctgcatcctgaacaactttcccctccaaggaaagcggccgctttatcagcagttccctgtgtctgaatgacattctcgtgatgatatccgcgatctcctcaatggagccagccgcaatgttgaaagcagccagccgttctgtcacttcgcctgccgtcagcctttcgcttttttcgagcttggcgtcaatcagatcatgaaccagcgcggccgtctcagtgataaataagtcggcgccttcttcttttgccatataaacagaaagtgttgcgacccgggaaatatgaagccagtcatggcccgtacgttcattgataagcttttctctgacccaattcctgacgctttccagctgctctttttcgttcaccgtatcacctcttatcgggccaaaagcctctgcaccgtatcttcaagctcttttgggttgacgttcggtgaaaaacgcccgttgacttcaccgtttcggtccacgataaacttagtgaaattccatttgaccgcttttgtgccgagcatccccttcgcctgttccgtcagatatttgaagagaggatgagcgtctgccccattgacatcaactttcgcaaacatcgggaatgtgactccgtagtttttcacacagaactcttgaatttccgcttcatttccaggttcttggttcatgaattggttgcagggaaatcccaatatttcaagaccttcctcccgatatgtatcatagagctcctgaagctgcttgagctgggatgtgaacccgcatttgcttgctgtattcacaatgatgatcaccttgcctctgtaagccgatagcgtcatgtcttcgcctgttatggtccgtacgtttatatcgtaaattgtcatctgcggccctcctttttacattcttcatttattttacctgttttacactgcaaaacaaacggtaaccgctttttccttccacttaacggaaaacgtttttttcgaggaaccaaacggctctttacccgtcataataaaagagccgctccgaatttatacccatttgccgcttttatccctgtcattatgcgttaaatacggtttattacgccgggatggattgaaaaatggcttaaaaatttctataatgaagaaaattaacggggaataacggaggtggcatgttgcctattaatataccaaatcacctgcccgctaagcaggtgcttgaaagtgaacacatctttgtaatggatgaaagccgggcttttcatcaggatatccggccgcagaagatcgtgattttaaatctgatgccgaaaaaaatccaaacggaaacccagctcctcaggatgcttgggaattcacctttacaagttcactttacgtttttaattccgagcacacatactccaaaaaatacggcaaggcagcatctggatgaattttatacggatttttccagcatccgccacaaacggtttgacggaatgattattaccggggctccgattgagcacctgccgtttgaggatgtttcttactgggaagaattgaaggaaatcatggaatggagcaaaacgaacgtcacttcaacactccatatctgctggggcgctcaagccggtttatactatcattacggcattgagaaagtggagctgccgaaaaaaatcttcggtgtgtttgagcataccgttcttaaaaaacatgagagattggtaagaggatttgacgagctatactatgtgccacactcacggcatacagatattaatacggagcagctgcaatcggcttcggatctgaatgtgctcagcgtttcagaggaagcgggggtctgtttaatcgtttcaaaagacgaaaaacagattttcttaacgggtcatccggaatatgataccgatacgctgcttcaggagtatgagagagacatagagagaaatctttcaaacgtagaagctcctaagcactattttgcgcccggcgggaaagaacctgttaaccgctggaaagctcatgcaacgttattgtttatgaattggctgaattattacgtatatcaggaaactccgtatgaatgggattaatttttgttttaagtgatacggtgacaaaaatatgataaaatactcttgattcagtatgcgtataacaaaactttaaaataatggaacatatcaattaaatttagtttaaatatgttggcgcgcttattataaaatgatgcacttgtgttatgtttatctatagacaataactccttacgatgcatgaagcttgcttgttgttgattacattgaggtgaatttacttgaataccaataaaaaagtattaattttgactgcaaattacggaaacgggcatgttcaagtggccaaaacgctctacgaacaatgtctgcgtctcggcttagatgtgacggtttccaatttgtatcaagagtcaaatccgattgtttcagaggttactcaatacctttatttaaaaagcttctcaatcgggaaacagttttatcgtttgttttattacggagttgacaaaatctataataaacgcaaattcaatatttattttaaaatgggaaataaacgtttaggccagctcgtcgaagagcataagccggacattattatcaatacatttccgatgattgtcgtaccggaatacagacggagaaccggaaaagtgatccccacgttcaacgtaatgactgatttctgccttcacaaaatctgggttcatgaaaatgttgataaatattatgtcgccacagattacgtaaaggaaaaactgattgaaatcggcactcacccgaacaacgtaaagatcacaggcattcccatcaggcctcaattcgaggaatcgatgccgaaagagccgatttataaaaaatacaatctctctcccgacaaaaaagttcttcttattatggcgggagcgcatggtgtgctgaaaaacgtaaaagaactgtgcgaaaatctcgttcatgacgatcaggtgcaggttgtggtggtatgcggcaaaaacagctcgctgaaagaatccctcagcagcttggaaggtgacaatgccgaccggctgaaagtgctgggttatgtagaaagaattgacgagctgttccgtattacggactgcatgatcacaaaaccaggcggcatcacactgacggaagcgacggcgatcggcgtacccgttattttgtacaaaccggttcccggacaggaaaaggaaaacgccattttctttgaagatcgcggtgcggctgtcgtggtcaaccgccacgaagaaattttagagtctgtcacctcccttcttgcggatgaggagaagctgaaccggatgaagagcaatattaaaagccttcacctccccaactcttctgaagtcattttgcaggacattataaaagaatctgaaatgatggccgggaaggcggatatggcattatcgtaaaagaaaagcacacgaacgattcgtgtgctttttgtttttttccggttaagctttgttactggaaaaataaagataaaaaatagggagcggccgcttgacgcccgctcccatatggtgtatagttgaaccatcatttaacaacgtttacatacgtacggttggatgatgacaaaattttttttagcacgaaggtgctacagtactaggaggaattaagcaatatgcaaaacggtaaagtaaaatggttcaataacgaaaaaggattcggcttcatcgaagttgaaggcggagacgacgtatttgttcacttcactgctatcgaaggagaaggatacaaatcattagaagaaggacaagaagtttcttttgaaattgtcgaaggtaatcgtggacctcaagcttctaatgttgtaaaactctaaactcaatacatgttgatcagatgacaaatagaggagaggcgtatgcctctcctatttgattgccgtctgaatctcaattgcgacaagattctgcttacagcgctgctcgatttcttcaatttgtttctccattgacggcattccttttttcgccatttccgctaaacttcccagatcaccgtatatttctttaaatgtctgctgaaggattgtttttaaatcattatcattcacggctggtttttcccttctctcccaagataccctgaataatagtaaataagccctaattaatcaggttcaatagttatatcggcttattttctatatttttttctattttccgtacatatttctaaaaaaaatctccaaactatttgcggaggtgttttttaatggactctgaattttttccaaacggactgacggataaacgccagcttgaattagcggtggaaacggcccagaaaacaacgggagcggctacccggggccaaagttcaactttggtggagtctgcttaccaggcgattcaggatgccagaacgatgtcacaatccagtgaactgcaagctctcgaccaggattttctgcaaaagcagcgaatgcttctcgacgattgccagcatcagcttgatgaattcgaaaaataaaaccgcagaagctgcggttttattttttattgatttgtcagcaccttgccgtaggctttcagcttctcccccaccgtgcattggttgatgcagaaagaatgagcgtgcgtttttccaaactctttgcggaaatgcttttttacgaaacagtctttgcaatattcatcctgaagctctgtcaattctttataaatgctttttttatccaatatcagtcatctccgttaccttctaatgttatgcggctttcaatctgccggtccgagagaatttttctggcaaggtcatccgcttcttgattttcctttcggtttacggcttcatatgtcggtgtcagctttaaggattcgagcagcgcttcaattttatccagccattcgttttgcgtttcatcataacacggccagctgccgtcaagctgatgcaaaacgacgagggaatcccctcttatcgtgattgaatttctgcttgcgccaagttcctgcacttccttaagcgcttcgtacaaagcggcatattccgcctcattgttcgtctgaagcgttaagcttttgtttttccgtatgcgatgccgcttgccgccgagagaataatacacgacaattccgagtccggcgcgtccgcttgttttgtcaaagccgccgtcgaaatacactgtaatgtcgtcaggttcgtacgcaagttcttcagtaagcttttctaattctttaagcgtccagctcgcgcctttttcatcctcaaaataaatgtcttttatataaggaaagcggctgacttctcttgcaagcatgcgcgctttcggaacggtcagccaatcttcggaaaaaaacgcgacagggcctgttccttttgcttctatttcgatatacggcttaagattcattgaaatcaccttaccattcattagttgacgggcgtgtgctataatcaaaccattctcaaattgaaaggaagtcagcaggttttgtttaacgatgtgttatggatcttatttgcggtcattcattttatcattgttcttctgttttataaaggatttggcaaaacgggcctattcgtatggatcggtttcgccacggtgtgcgccaacttgcaggttgtcaaaacagttgagctgttcgggcttacggcgacactgggaaatatcatgtacggcaccgttttcttcgcaacggatgtgctgaatgaaaaatacggtcccagagaagcgcgcaaagccgtctggctcggcttttccactttgctcgctttgacatgcgccatgcagggggctcttttatataaaccggctgcgtcagatatcgcgcagcctgcccttgagacgattttcggttttctgccgcgtgttgcactcggaagcctcttggcttttattttcagccaaacgatagatgtttatgtatattcagccattcggagaatctttccttcagacaggcttctctggctcagaaacagcggaagcacggcgctcagccagctgctggatacatttatcttcactgccgtggcctttatcggcgtttattccgcgggcgtatggttcagcatctttatttcgacttacctgattaaatttgcggtatcactcatttctgtcccttatgcgtatgcggcaaaacgaatgacaccgaagggagagtgacggatgatgcctgctgaaatttacgtggacggtgcaagcgccggaaacccgggcccctccggtatcggtatttttattaaacatgacgggaaaacagaatctttctcaattccgatcggcgaccattcaaatcaggaagctgaatttctcgctttaattgaaggaatgaagctgtgtgccgcccgcggatttgagtccgtgtcattccggacggattcagatatcgtggagcgggccgcggaacttgaagcggttaaaaacaaggctttccagccgtttgtggatgaaatcatccgcttaaaggccggatttccattgtttttcattaagtggattcccggcagacaaaaccaaacagccgatcagctcgcaaaaaaagcggtccggctgaataaataaccggaatgaaattgcgtttcactgttcatcctacaaatgaggtgaacagctatgagaaaagaaaataaaggccggcagaccgggggcgtgaatcctcagggaaatatggaaggaaatgcgcataaagacccgaaatcagcccttgaaaacaacgcaaaaaaaagcaatacaaaacgctagagggatcagctgatctctctggcgttcagcttttcgagcattctttcaattccttttatctgatggcgtctgagcattaaggatgcttcttccatcttcaatgaaaaaatcgcttcttcaagcgtacagactaacggcacctcgcaatgtatttcagcaagctgccttgacagctccaattctttcaagctttgctgaattttcgtttgctggcccttcggcaagagagcgaggctttctaataaccgttctatgttttcgtattcacggatcagcttgtacgccgttttttccccgatccctttaacgccgggatagttatcgctcgtgtctcccatcagcgccttaatgtcaatcagcgcttttggcggaacccccgtttcttctctgaatatctcatctgtatataccttataattgccgatacccttttgcagcagcgctacttgaacttgatgattcatcaattgaagcagatctttatcacccgttacaatcgtaatttccgcttctccggaaaatagggcagaaagcgtaccgatacagtcatccgcctcatagccttttatgccgatgtttaaaaaaccgagctctcgcgctgcttctttcgctaaatcaaattgcggaatcagctcaagcggcggttcgcttctgttggccttataatcttgaaacaaatcattgcggtacgttttgcttcccatatcccagcagcagacgacatgtgtgggctgaaacgtatcaaccgccgtaatgagatgctttaaaaaaccgttgacgccgtttgtcgggattccgttttcatttatcataaaattgcgatgaacggccgtcgcgaaaaacgagcggaacaaaagcgccatgccgtccacgagcagtaatttgttattcatatatcgaaactcctttttttattcaatgttcctattttaccaaagaaggcggtaaaaaaacagcatccccccatttggaagatgctgccgtcacgttactcaccgtgtcttttattgcttgccatcagcttttcagcttcacggccggcataagaatcaaatttctgtccgaaaccgtttttctttttggcattgttattctgctgaacatttctgtttcccagttttgttctgcccattgtcatatccccccttagagaagatacggatagtatgtacagcaagcgctgatgacacacgcggcaggttcatccattactgtctgctgacgaattctttcaccatctcttcacttacgaatcgtctttgcggcacgatgccctttttcgccagctggttcatttttgcggtaatgccattgatggcatctgtcgtgaacggttcattctgtctgcattttacaatggcttcttcaatggcctgttcacgctggtagtcaagctgtacaaatgttttgacgtgctgatgctgttttgcggaatgtgctgaaattgctttatggacttctgacataaaaggtttcatctcgcttttttcattttagtctaccacgactgttatctgcccgccaaccggatttttaaattttcagcatttcatctttctttttccatgctttttcggcttcgtaaaggtgttcaatttcccttgcactcgtattttccgcaagaccttgtaaataagtgtcccgctgctcgcggatctgggacaggcttttatccgccatgtcttcttgcagacggcgcacctgctcagtatatcgctctgaaaggctttctttctcctgctcaagccacttttctgtcactttttgcaggctgagcctgagcccttctacaaacgctgcttttccgttctgttcaaaaaactgcttcggcgatttaacttcttttatgtgatgtgtgaatgccgagacgtcaatgaccggagcgacttctttcagctgaacggcaaattcgttttcggcgctcacataaatggagaaatctccgtcttccataagcttcttctgacagttttccatccattcctcagtcatatggcgctcaataaaaccggtcatccggatatcgagcgttttcagctcttgaatatattcaaaacggaattccttgagcgcttcattcagcgccgctgctatattttgtttccaatcgccgttttgaaggcccggatggaaggcggttttcagcatatcattcgcataaaatgtcaggcgatgtttaatgtgatagagctgttcttccgtatctttcatcacttttcgaatgatgacctcagacgtacggcgctttgaaatgtcagcgagagctttttcataggaagactccagatgctgtttctttttctctttttcttctgccgactggtgaagagattcgtgaagctgttccaccatatcgcacaatttgtccgcctctgttttcagctgggcgcagctggccctcattacatcttcctcaataaagtgctcaagtccggttcttacatcagagaacctgttataaaaagctgcttttttacccgcaagctcttctttacttgagacatgatataattttggccggttaattccctcttttgagagttctgagcggacatagtctttgacggtttccagctcgctttcggttttggccagatcggcggcgttaatgacaaaaaacattttatccatgccgaatgattctttgacgaggccgagtttcttcagaaaagacctgtctccttttgaaaaagaatgctgatagtacgtcatataaaagaacgcgtcagcatcttttatatattgaaaggcaagttccgtatggcgcttgtttatactgcttgctcccggcgtatcaacaattgtgatgcctttttgcgtgagaggcgaatcataatacacggtgacttcttttacgcagcaggccgttttttcttcggcagcatacggttttaaatcttccaccggcaccgtcagtgtctgcctttgacggatctgttcttcatacgtatcaaacgcctgcagcatcgtctgaatcaccgggataagttcatccggaactttcccctttttaatggcataattccatctctctttcagtgaacgcccctttacatcagcgtctttcagctcagtcagctgaagcatttcagcgtccagatcctcctccgtcttaaaaacgatctccgcagatttatgcggtttgccggcttgcggtttcgttattttgttaatcgtagccgttgtgggcgtcggtgatgacggaagcacgtattcaccgacaagcgcatttgcaaatgatgatttaccggaactgaatccgccgaataacgccaaggtaaactggcggttttcaagccgctcaatcctgcttcgaaaggcttctgcctgttttcctaatatgctcgaggattcaagaatcccggcaagctcatagaaccgatcagtctgctcttttataggaagttccttcatcgcatttttttcgggtttgtttacttcatactgtacagtctcttttggtttctctttttggacgggcgcttttgcaaggcgtttttttcgcgtataccagtcgccgcttcccgtatcacaggtcaattcttcttcccacaaagcgcggacccgggctgctttttccaaggcattgcgttcttcttttgccgattgcgcgagctcatcccttatcttcttttctttttcgagccggtttttcaagttctcaatgagcggtccgttttttgcctgaacataagcggtaagcttctcaatgagttccgctgtctgtcttttggcttcccttctgatcatctcagcgaggtctttcgtataagttaatacgtattcagatgaaaaggccgctccctgcttaagggcctgagcggtgatatcatcagaaagcggtgtgcggtacgcctggattttcttgatcagttcgtccgaatccgcttcataccgcttggccgctttcgtaaatgtgtcgataatgtgccaatccgcttccccttccgttctttttttaatatcggcaaaaaattcagcatgccttctctctttctcctgagccgttttcgcttttgaaaagaataatccggttttaaatgagggctgctgtgattcaatataagcagatgcaagctccctcatctcaaagggtgtcaaattagcgttttgcaatatgttctgcacgtcttttctgatgtctttctctgctgtttcagcctgttgaacggctttattaagctcatcttcaacagaacggacaagtgcttcttgtttgtcaaactgctctccgcttccgtttttatcatcttttacgagcatctctgtatgctctttgactaagtgtgcgacttttctctccgttaaggaccataaatttgtttttgcctgctgtttcagcttctgcagatgttttttcagctgttccatgccgtttaaaggatggtcaggctcagtgacagacgtaaagaaaagcgattctttcggtattcccgcgccttcaagcatatcttccacctgcctgcggtactcttcaaacttcgtttcggtttcatcatgcctgtcaatttggttgacgatcagaaacaaattcggaatacggtctttgatggagctgagaaacagcatattttcttctgaatgaacgtgattataatgaacgacgtaaaataaagcgtcagcctggtggagaaccgaagcggcagataaaaaatgcgcttcgtccgtcgaatcaattcccggtgtgtcaatgtaggccgcataaggctctgactccttaaagccggcatagacttccaccgtttcaatttgctcaccgtctttacagaattgctgcacttgttttttatcgtaacttcctttaatttctgcataagccccgtccgtcgtatgaagcacgactttatcttcaccgtgccggatgacaacgaggttggcgcttgtgggaatcgggcttgtcggcagtatgtcttcaccgagcaatgtgtttaataaagaggactttccggccgaataatgcccggtaaacgcgatataaacctcttcatcagccgcttttttcataatggccgcgagctgatcggcccgtttttcatcctggtgatccaataattgtacgtataaggcacccgttctgctgaaaatctccctgttatggcgttcttcttctgtcatgtgtcttaacccctttgtgtctgtcgcatcaaatgacgttttcatttttagaaagctctgaaaaaaacctctcccccattttacacaagaatggcccacttttcttcaggaaacgtaaaaaagccgccgatatcggcagctgataaagaaaaaacacccgcggcattaaaaaccgcagatgtttaagaagacatcgatttattcgaaacttttttcaatacgaaaccaattaaaacactgtatgtacaaacggctgcaaataaaaataacattgtcattttcggcaccaccttgaatgagaatcattttcatatttacatcttatcatgagtgagaatgattttcaatctctattttgcggtgttttcttctagcgctttctcttcggcgcgaatccttacagtgagcatgcaggcattgagaatcgaaaagagaaacagtgtccaatacgctccgtataacagcggcagaaaaataaattctaagatgacgaccgcgtagttcgggtgcttcatccacctgtacggcccctttctgacaagctccgcatccggcacgacaagaattttcgtattccaataccgccctaatgataatagagcccaatacctgatcccctgtacaaataaaataatacatataatggcggcccaccttggagaaagcgttttttgaaacgccgccacctcagctgtaagagagacaaaaaagagcacgtgcatcaggacgagaaagagataatgtccttctccgtattcgactgcgccttgctttttcaccttctgctcattgcgccgggccacgatcatctccgcaatccgctgggccgcaagcagcatgataaacagccaaaacattaagaagcccccttttcccagctgaacagcaaaagctcagacgaaaatcccggcccgagagcgccgatcagccctttttcgttttctttctgccggccgcggagcaactgttcttttatcacatgaaaaatagttgcggaagacatgttcccgtgtttttgcagcaccttccgagatgcctcaagctgaccggtgtccattgaaagactcgttaaataggcgtcaatgacctttttcccgcctggatgggcaagaaaggttttaatgtcgtgaggaccgacaccatattctattaaaaattcatcaacattgtccttcagccactgtgaaaccagggtgggaatatctcttgaaaaaatgacttgaaaaccgctgtcggtgaattcccagcccatcacatcttccgcatccggcatcatcaccgattgagtggcgaatatccgcggaagaagcggctgtttgacgtcgtttcggttcgccttttctcctccgactagtactgcggcaattccgtccgcaaacagggaagttccgattaagttgctttttgacttgtcgttcggctgaaacgttaagctgcagagttcagccgcgatgacaagcacgtatgcttcaggatatgcgcggcagtattcgtacgccctggacaggccggccgctccgcccgcgcatcctaagccccagatcggtatccgttttgttttcgcagaaaacggcagctgattcatcactttcgcttcaatgctgggtgtcgaaagcccggtgctggaaataaaaaagatcgcatccactttttcataaggaaagggatttgttaaacaatccgggtttgttaaacaatcaagtgccgcatccgcactgtgcttaacggtttcttccgtatacagccggttcttttctgaaaaaccccgcgccgttttataccattcaatcggccggacaaactgccttgattcaatttcgccgttttgaaaggcttttaacagccggtcaatatccttaaatgaatcggcaaacatccctctcgcaaaatccgccgccgtttcttgcgagacatgatattccggaatgctggttccgaccgataacacatatgccatgcccatcacctcttcacataaaggtttccgcttttttcctgaatgtatgcataagtttgaagcgaggatttcactgacatgccattttaatttaaaattggcccttttgaatgataagccgctcgactatacttgatccattcataaaaaaaggttgtgataagaatgctgaagcccgtcattcttaaagggtcactcgttcagttagagccgatgacgattgatcacactcaggcactttgtgaagctgcttcagaaaataggacgacttacgcttacacccatgttcctgacggaatcgaagaaacaaagcgttatattgaacgtacgctttccgattatgaaaaaggacttgcattgccatttgcagtacggaatcttgaaacagaccgaatcgtcggaagtacgcggtttatggatgcggaagtgtttacgcggccggcggacgcagccccggaagtgtgtgagatcggcagcacatggtatgcctctgccgtacagcggaccggtgtcaatacggaatgtaaacttctgttgctgacccatgcgtttgacgcgtggcaagctgtcagggtgacgctgaaaaccgatgttcgcaaccagcgctcacgaactgcgattttgcggatcggtgcccaatttgaagggatccgccgcgcgcatattccggctgtcgacggcggcctcagagataccgcctactactccatccttcgggaggaatggccttatatccggcaaaacctttctggccggcttgcagcatataactgaaaaacctgccgatatatacggcaggttttttacatattcggatcatggacgtataaattgagatcgatccgtccgtctgacgtgaccgctacgccctcagcttcaagagacagcttctgtacagaaaatatctcttcatctcttaatccgatttcaccctttgcattgatgaccctgtgccaaggaagacgatgctttttactcatggagtgaagaatcctcacaacctgcctcgctccccgcggacttcccgcaagaccggcaatttgaccatacgtcatcacttttccttcaggaatctgtttgataatggctaccgcccgttccgtaaatgtcatgtaactcctcatttcgcaagagcagatgattttcgagaaaatcatctgctttctgatcttatttttatagatgataattgcttcatcatcatacttattacatctctgcgtttaaatagattatctgtttgttcacaaaaaattaacaaagataggcatgtacatgtttaacataatatgtaataatacaattgtattaaaaaagaaaaggagtgtttgcaatgaaaatgaaaaaagctttagccggctcagccctgtcactcgctttactctgttctgccgcccctgcttttgccgcaggtcctgctgatacaccttctgcagaaagcaaaacgaaggaagtatctgctttggcgacgttcatacttaatggttatggccctgattatcctacttcaatttaccggaatggaatcacctattatttagacaacatcaccttccatggtgctgatggcacttggacagccgtctacaaaagctgatttttcatgacggcggaatgattgtctcaagtaacaactaaaaagctgctaatataagggggctttgcccctttttttagtttcactccattttataattgatccagcatatagcacctaggtgcgtaattttattacatccgatgatcattattagttgtaatgtttctgcttttagacgcaaaaacacataaactaaaattctctcccgcgtgtctatccaaaagccgagtctcaactctatcaatccagaacattttatcgacgcctgagttccccagctaacgttaagaaacctcttacttgctctttcatttttgataaaacacaatctagggtgataacatgagatttgcttgggaagaattaattataattgcattcggaatgattttactgagaatttcagggagaaaatccattgcacaaatgaccatcgcacagacaatggtgatgatttcaatcggtacgattatcgttcatcccattttagaaaccagtttattgaaaacattaatcgctgcgtctatccttttagtgctttaattttgatggaatggtttcaagtaaaagtaaactggattgattttttttaaccggaaaatctaaattcgatatagaagacggccaactaatatacaaaacttaaagaagctgagactgacagcagatcaactcgaaatgcgtttaaggcttcttggcatttcaattaaatatgccactttagaagctaatggacaattaggctacgaattaaaagatgactgtaagcctttaaccatcaaagattttaaaaatgtgatcgacccaaaatgtcttaacaaagagcctcagccacaaaaagatgatcaagccaatctattcgaggaaatcaaaagacacagactcagcacaagccaaaaaatcttgaataattcgctgattagtaaaaccttttgttattcaaaaccaaagccgaatcagaccgttaaccgcgccgatcattttttaccagcccgtttttcaagaaacaaaaaaacatctgaagcagatgccttttttcagacgagatccttgtatgcgcctgaatatgcttttcagccgctatacccaccgccggccttagctataatgttaatcagtttgtttttataaaatcattgattaattgatcagtcgttaatattgtggcaaattcgtcatgcaatgtagccagagatatattgtgaatagtctcggcatcataatatgtatcattttggtctttcattccgaaggctgctgttgcatctgaaatgaggtaggtatcaaaccctaaattaccgctcattcttgtagttgttgaaacacaatggggcgtagtcaaaccagttattacgacagttgttatatcatttgattttaaaatctcttctagattagtcccgataaagctgctgtttactttcttggttataatgacctctttatccataggtttaacgatctcctttatagcaaccccctcattttttggataaaataaagaaccaggtttatcagaaatatgttgtatgtatatgactgtccatcctttttctctccataatttcagtattttactaatgttttcttccgcttttacgttatttcgttctccccattttttataatcgaaagctttttgtacatccacaatgattaaagcttttttcttttctgccaccagataacctcctatattgaaaattagtatttataacattttaaataaagtttttacttttgtacaattgtttcagttttaaatttcatatcacacctttcccgttggaaaagcgctggaatagctaaatcaaacactcactcaaaggctgcagctcaccagaggccagcaataatcaactctttttctctatatacatatcagtatcctgaaataagctgcaacagcggatgaaaggattgccccttttgccatccactcccctaaaaaaattcacgctgcgcccacaaaatattaacaaaaaacctcttggttattattgtattttgtgtaataatacaattgtattaaaaaacaaaggagtgtttaaaatgaaattgaaaaaagttttaactggttctgccttgtctctcgctttactcgtttccgcttcccctgcttttgcatccagccctggcaatacaaatagcgactcaactgaaacaaaaatttcgacacaagcgatcaaagattcttttacaatggattaccttcatagatgggatatcccaaatacaactgttaaaaatggtgttacttattaccttaagaaagtagagataatcgaagggttctatcgcgcaacttttgaaggatggattaattaaaagaaggggcttccccttcttttcactctcttttgtaaggatccgtgcacaagacactcccctcagcgcccattctgcagttgcacttcggcatcaggcatttcattccatgtctaaaccaagtttcgtgtcatcaccgtccgaacaatgatattcgtttatgatatgatcccccattctcctttttttcttacattcagtcatatgttcacgtacatatagttcgggacggttgttcggcgaaataaggcggatgccgcatcactcaatttatttcttttcaaacaatgaaactaataaaaaaagaggatgcctcacaaaaagttcagcaaactttcggaagcatcctcgatctcgggatttcataaagaaatgttattaaaatgttatttttttaagaaaaacggataactaaccctcttgaacccttgtcacatcaagggtttttttcgttttaggaatcatattataaacaatattcaaaaggacggcggtaaagcttccggcgacgattccgtttgtggtcagcagatttaagtaagacggcaggtgcttaaacatatcgggaacgacagttacaccgagtcccaatccgaccgaacacgcgacgatcagaagattttcctgctttttaaagtcaatttgactgagcattttaatgccgtaggaaatgaccatgccgaacatggccaccatcgcgcctcccagtactgaagacgggatgatggtcgtgaaggctgcgattttcggaaaaaggccgaatagcattaaaagtgcgcccgtgacaccgatgaccgcgtttttcttaatccccgtcagctgcacgaggccgacgttttgggaataggccgtatacggaaaagcattgaaaatgccgctgatgaacaccgccagaccttccgcgcggtagccttttgctaaatcacgttcagacaggcgcctgtttgtcaggtcaccgagagcgaaatagacgccggttgattcaacaaggctgacaatggcaacgattgacatcgtaataatcggtgccgcatgaaatgtcggcgtcccgaaataaaacggtttaatcatttgaatggcgtcagcattcgccacattgtcaaattgcacttttcccataaaatatgcgatggccgtcccgatgacaatgccgattaaaattgaaatggatttcaaaaatccttttgtaaaccgataaagcagcacgatgatgacaagcaccgtaaatccgagggcaaggttagccggatcaccgaaatccttgctgccttccccgccggcaatatgattcatcgcgaccggcattaaggtcatcccgataatcgtcacaagtattatagtttaagtacaacaaaaaaagagccggcttaatggctcttttcttttgctaataaattagacattacttcattcacttttaggttgactttcttaattgcttcagctgatggttgatttatgctttcaatcgttatatgatatttttctatttcaaacgattgctttgaagatgatttaacgaattcactcatacagcgctcacactctgctgttcttttttaatcaaatcatcgcaaagcttattcaagtaatatgtatagttaacttttttcttcatcgaacggacttctgtgccgatctcttcacaaattgcaattggaatgctggctttgtttactttattcttatatgtatgtttcaattgtttttcagctatgttcttatatgtaaggaaatcattaatatgtacgaaataaactttattttccggctctctaaattgaaatagaaacccagggattacgtttggatattgcgtagcctcttttaagtgttttatctgctgcggctttataatcttctcttgaaaggcaatagacttatcctttgttgatttaagctctaatgggaataagtaccccttaaagtgcaagaagcaatcatatttgttttttgatactgcagctcccctttttaaaaacactggattaacatctttaattctatagaagaacagcttttgacctgcagctgatttttctatatttgcttcaaaaaccttgccttggtttgtacctcccaatcaatcactctcctaaaatattgaaactaaaattgaaattagaataaacctttgctacactgttttatgttaattaatattgaaagaagtgttcgaaatgaagcaatggacacccctgcgccctcgtttaaatgaattaatgtttgaatatgacctcacagttgatgaccttttcaaacgtacaggataccccagacaacgtatccacgattatataagtggagctaaagcaaatatgaacttagctactggcatgacttttgctgatgccattggttgctcaattgaagagctgtacgaatggaaccacgaagaaagaagaaaagttaaatcttaatccctttccgagcccatctgatttcctgcatcaattcttcattattatccgaaaggttgattaggttacggtgggctctttcgtattctttgttctcgagagcttctttcaccgtacccatttgtctttccattttgttgaacagtatttgaatgttcttaatgtactcagttattactctccacctctaatcatctaattttatttttactctaaataaatgaccgattttatctaatgttcacttcaccttatttgattcaaaagacaagtgtacccgtatccaataaagtgcatcgctcgcttcatgaaaatcacctttaaagaaattcttcgctacactttttaataagtagaaaatatgtctccagtcgtcaaacttaaaactcataatcctctttatcattgaaataaccctccccaaatcactcctgctgcaatggcaacaatgaaaactgaaacaaatttaattacaccaatatacactgcaaatttaagattcccttcggaatccattcttgctaacaaaacaagcccaaatgcaacaaacaaaatccaagctgtaacgatcatctacttagaacctcttccaactgtatatccgccggcaatgtcatttaagatcgtggtaccataagaaacctttttactctcattgtctttatttttagtgtaattaatgaaatcatcgaactggtttaaatacactccgtaagctgtgttattcaatttataaacggtatcgtcacttggtttcaaaaaccagctgtcagtaccttgtccatatacttcaaaaacttgaacaatttcgtccttatgctcaaagtaagccagcttattttcaagttcacattcctcatcaactggatttccaacatgatttgtagcatattccatcatagaagtaagcatgtagcctaattcgacgtccgagaagcttaactgtggtttaggtgttccataataaatatctgcttcatttagtgatcctctttggttcacttctttaatgatctcttcgatagctctgtagccttcatgaatgatgaattccctacgttcctcatctcttcgtttatactcctctaataaacttgttaccttaaactctgtattcttcatctaattcctccttgtatgaaccgattatttctggtatccgttgaaagaaagtaataatgcaatccctagcatcatgtgggtattcgcaatcaatttcggcaccggatatgtaaatttcatattctatgctggatattagttgaggattataaggtagctcgaactgtaggcacatcctcagattaggtatctgttcattgacaaacttcaaaaacttcttctcatactcaggaacctgttcatataatttgtttgcaagctcttctatggtgtctgattgcaccttataaaggttctcaaacaatgttttgttaatggtcattagctcacttaaagcttttacagttttctgatttccagttagagtgactccccaccatttaagttcctttgtgatactctcttgcatttgctcccataagaaattgctattgtacccccttagtttattagaaagttgtttagactcgatatgtgagccattactgaaatgaatattaatctttctctctaaactattgctcacttttgactaacccccttaatcgttcaacttcatcaactaaccattcagcatagctaattttaattttcatcatctttgttgatctaaattctctagacattacttcaacaaatttcttaacttcatcaaattcaatctctttcattgaacttatcccttctaaatgaaatcaacattttattcagtatcaacaaattcaaatcttgatctgaaaaattcatcgtgttcataagccccatattcattgtctttagttgcaatgatatgttcttcacctaaatcatcaatgatttcaataccatcatcggttatacgaaaatcatattttttatttaatgtaaactctttgtcatgacagtctgtaacatatttaattttcacattagacattttactttctcccttctgtataaaattagaatttcatttgatttcaaatgtcttcagctcaaacgttttatacgtatcaacttgcttacctggtatctcatttactctaggatacatatcatagtcatatggatatccaatgcagttcatgtgaaagctcgttccatcattgtcaaactcagcttgtaaatgatcatgaccacaaacccaatgttttgcgttaatgaacgggacatcaaccatatagcagctgttaggctcaaacggagaataaggattgtgaacaggtggaacatgtgagacaaatacatcaatgtgagagttttcaagagtgtcataccagcccattgattctttccacattgctcgtaccccatcttctttgctgtatccattaaggctgatatagtttgaatcattagagacacctttgaagaaatcccatccttcatttccttttggaagataccacataacatctcctgcaaagactttccctttgtatgtatccgtagactttattaatggagtgacattattgatgtctgtagccttctgaattaaatcattcacccttcccaatgaatcggaatattttcgttgctgatttttactgagtaaataaagatcatgattaccatatgtgaagtaaaccttttcatactgctttgctacttcatcaagtacccacagtgtctgttgattccactcagtaaaatcaccggcaatgattaatacctctccatttccattcgatatcagccttctaataatctcccttgttcgcctttcccatttaatttggtcattgtcccaaggtatccagtgattaatatgcagatctgaaacataatcgattttcattttatcccccttctttgtttaagtacgtgttaattcatgctccatgaccaattgacatttaaatcccctcactttaaattaatgtgtatatttacaaaacatctccacacaatacaattgaacaagcttgtttacatacaactttaggagatgatcatatggctcaacaaaacagatcaaacaacagcaatgaattacttgtgcctcaagctgctggtgcccttgaacaaatgaagtatgaaattgcttctgagttcggtgtgaacttagggcctgagacaactagccgagcaaacggttcagtaggtggagaaatcacaaaacgtttagttcgcctagcccaacaaagcatgaatggccaatttcattaatgtatgaggggattactcccctctctttttatgctcctcttccaaatccataaagtactactggcattgtattcacctcctttagtgaacaaatgtacttcgtctaaccagctcgtttaaaacgatttgaagttttcttctttggtcttttatgtatgcattgttatcggtacgcaatccatcattaattctattttgtatgtctgttttcagtctctctaagctttcaattggtaatttttctagactaactttatatgattgattcattttaatagcccccagcaaaaacgagtgaaattatcaataaccaaaagactgctccagaaacagcaagaaagctttttgcaatactcataaactcttgaaaatcattcttcaacgactctttcactgcatcaccttctctttaaaatacagattttacttagatttcagttgttttgaactcttgtttactcaacagctctaaatagacacgattacactctgtaagttcatattcttttttctgaagtttcctttcaagctcagttatataatcgagaagcctaggaatgtcttgccgagcgtttgcgatgaagtccgcgtcttctttagttactgcagctgctaaaccatcctcaagagtaactatccaataacgaagattttcgttccctggccattcatggtgaatgtttgcatgccaaaatcctttggttgtcgcttccatacgttgacggatttcttcgagttgatctttcgttaatttttcattcattcctcatctcccactttcaattaatttgattctcaatttcctcaataaatccctctaaagcttcttcatcaaccattacttgtccaacctggactttgatgatttctttcattcggtcatccatatttctaaattcttctgcttgctgcacagtaaacattgatctgtatttctttatgtataaaagaaattctttaagtacaccgatctccccaattttgtggagattggaatcttcttgttccacttctagccggagtaaagctgcttccttttctaaaacatcaatttcaagctgttctttctttgacagcaattcttgctctttttgttgcaatatatcacctccttaaagttctcaccgaagaaattcacactccattcagaaaattcaccatatattcacaacattctccatttatttcaaaattaattgttataatatagttgtattacatacctaaaccaagggagatgcttttaatgaagaaaacagcaattgctttattagtttcaactattggtcttactggtgtagctgcgtcagcgaatgctactgctaaaagtgagccggttgccgcccctcaaaataatcttgaggtcttaacaaacaccggtagttttcatgctcttgggactgatactcacgttaaaaatggtgttggtgaagtcaacataggtagatctacttcaggccctgcatcttacgcaacagtagtcactagctttacaccaaacaacgtaaccaagatttccatcatggggaaacaatggtcaacagggacaggaagtagaagtgcaaatgtgacttatgaattaatgaagtcagatggcactgtgctggcttctgttacaccgagtggcggaaattatattagtgaacaattttacaaagtatttagcgtaaacacatcacttatttcaggaaaacaattgtatgtccgagcacataacaatgacagtgtagctcaagtaaaagttaatgttgatgtttattgggattataattactaatacattgagagggcttccctctcttttttatttaattatgtaggcttgtttttaaaccgattcatactgtaaatgcttgtttttctttttgctaattttatattctgcaatcttcagtgattcaagagtccatccattattgtttaaacttccgaaaagcgtgttcagtaattggagctcttgttttaagcttcttcgctttctcaatatcttttgacctttcaacgaaaggtgatatccctctgaagcattaaatttgtcctcttctagcttgtgataaaattcattgagctctttatcaactttccctagctctttataaaggttatcaatttcattttgaagtcgttgtttagtctcctcaattgcaacaagaggtttggaaatggaaacaagataatctgttgcagttttcatatcgccactcctatttattattttatttttattctaaaagtatgtaaaaaaaagacaagcttttaacttgtctttatcttatcattcaacttctaaaaagtctataactattttatttttattctaaaattattttgagtaagtcacaaatgaataattaaatgtggtattgttgtctgctttcctgtgatccttttcaattactctccagtcatcatttaacctgggaaaatatgaatctgccttctcagcaactgaatcaacaatcgtcaaataaaccttatcagcatgtggtaagaatgcctcgtatatagcacctcctccaattaccattacttcttcatctttatccaattgtcctcttataagctttaatacatcatcaatcgaatgataaacaaatgaagagtgatcaggcttgaaatccttatttttagtcaatatgatattctttcggttctgaagtggctttcttgtaatgtttacgattgaagcgtatgtaagtctcccctgaatacacaactttcctgtagtgagttctttaaaacgtttcatgtcttcaggaatatggtaaagcaaattattttcatacccaatggccattgatttatcgcagcaagcaataagagatagcattatactgctacctcaaagtaaagcttgtctccatgcttataattaaccaatttgaaatcatcaattgtgaaatcataaaaatcttttacatctggattaatccataactcaggtgcttcatactgctctctgtccatttgaatctttaaattgtctatatgacgagtatatacatgacagtctccgatattgaagatatactcacctagctcatagccagtaacttgagcaatcatacgctgcaatacattgtactggaacacattaaacggattcccgagtgcgagatcattactgcgacagaaaacttctaaatgcaacttcccgccttttacaagccattgagtaccatagacacagggagtcaatgccattgagtctaattcatcaggattccaaagcgttgtaatatgtctgcgtgatgatggattatttttcaactgatgaagaagataatcaacctggtcaaccttttcaccgtttagcattctgttcttcttaccaagctgatatccatatgctttgccgattgtaccgtcttcttgtttccattgatcccagatatgtacgcccatcttgtttaattcgtcaacatcatttgatttaagctgccatatccaaagtaattctctgattgccgttttccaagcaacttttttagtcgttaaaatcggtacttcggaattatcaaagcgcatttgcttactgattacacttaatgtatgtgctggtgttccatctgtatcccacttggttctgacatcgaattcttcgtcagatgccccattattaattatgtcatttatgattgtgttgtactgcatatcaaactgagtcataattctattctcctttatctaaaccaactgataataaagttaaccacgaagacaatattaccgcaaacaaaaagcatgtacacgaacttgttttgtttattgtttgagtcaccgtccaaaacatcaagaattttaaacattgttaaaccggtatatattaaagcaaaagctgttcaagctaacattagcaagttaccatgcgtaatcagtccaatagtagccaaggggataatgaacgaaatccccttgaacaatgtcatgacatacactaagttcttattcttcttcagttctttatatggtgagttagaaagcaaatgtgtgactttagcgtatacgttctgttcccctcgagtaattaatctaatttcattaatgtttagtgcaaataagtatgctgcaagtattaacgtaaagtatgtaattataatacatccccctattttattttttagagcagaggaattaaatccaactgctctggttaaatttattgatagatcgggtcgtagcagtttctatggcaccattcaacattgccatgcgtttggtacatacatcgttgaaaacatcgttcagcactattaaagtgggcaatgtatggtgtaaattgtggcaagtaattcaaagtatgcagcgacggtgtgtaccatattggatattgtctaaacacattaaaacctccagttcttcacagttttcaatgtattgtatttaagttcacacccaatcgatacttgtcactgtttatatagccatgtttaaaatttaaatatcaatcaaaaagctcgccggctctcttcatgtctttaatttcttcacttacactttctttgattgtgtgaggtaactgatcaattctccgttggattcttttctgacctgtatttcttatatgtaaagttaattctttaaacccttccattgattcgtctgaaattaaatcaaactgatgttgaatcttagctaataagcttatgtattcttcttcatcttcactgaataattggaggccttgtttaaaattttctatttcttttagatgggcttgtattttctctatatgtttatccatttttcttcacatactctttgacaacatcgacaatttcatgagtattgtggaatacagtttgccctaatgaagtggcatgagaataaagagggtgattatcaatatttttaatttcttcttgtaaacaatcaagaaggattctttctgttttcactgacacttgttctaacagccaactgttcccgttgtccatagaaagctgaattcttatttctggcggcaagttcttaaatgcattaataaagtcgtcaaccttatattgatcagtaggatttagccttgttttaattgaaattttcattttcaaatctcctttttgttttaatttgattctaataaactcaaaaaattaactgctgcaactctatacctttggtcttcttcataagctgcaacttgtttcatatgctccaaaaacacatctgcaagcccttgtttttgaataaaccccaaacaaagtccgtttctgaagagcatatcatcatactttgcttgcaaatctttatgactgttattgtttatggtctgtttcctcctctttattttaaataaaagtcttcttttatagagatgttcgttcaatcgacaccctttggtatccctaagatctttatcaactttagtcatcacaatttcgcttgtttctaaattttgaacttgtacatattccctttcctgtctacatgatagtgtccttttggataatatacatgtccatctgcatttaccttatcaattacattaaacatgaattcgccctgttttatattccctgtcatccacgcctttttgcgtaatctttttttcatccagcatctcctttgtaggcataattgttgagttttttgagtattttaagttgtaccctggctgagaccctccactgacaaacatcatgatcaaagccaggggtttaaactaataaataatatctgccacgtatttagaccaagattctaaacgattaaatactaatggattatcaaaatcttgtttatttaaccaaaagccttttaattgatctgtttctcttacagatacctctgcattttcaggcagtttaacaataatcattatgcctaaatgaactttccccacttcatttaagtcatcgtttatcaaccccacaacttctaaatttaaattggaagttgagataaacacctcttctgaaagctctctccttaagttctcatcaatagcttcccaaaaatttgttgcttcagttaaattcatgtgcccgccaacaccaattgataattgatcatgaagcctcttttccccgctttttcttaaccgctcgtatgcaaatactcggtctcctttttgtaaaatggcatagggaattggttgcttacagctttgatccctctcagcatctcccctattcatagtgatcatgctttcagcgagattttcgattatttgatcaaccttgcctagatcagattcaattccttgaaagactagttcttcattatcaaatactttatctctaggtgctacaacaattacttcatccattttccccatttaacattctccttttgttttattatgtgaaaaatctatccaaaaattaaataggccgcccaacatgaatatcgttgaataatccagtcaatatgcttaatcttacagaaggttatccaatccattatcaacaaaggtattacagtaattaaaaaaattaaaagcagtatgtacttccaccatgaaatctcgttaatattccaaccgaatatggttagccctcccctaaggaaattatcttttattgtaatccctttagtagttcatcaagttcttcaggcttaaatccaacactacgctttacttcttcttgctcattcagcagtatagtcaccggtacactcattacctcaaattgcgctgccacttctggcttctgtgttacatcaaatgtctcatattcgactcctgcttcgtttaaataattggataccattttgcaaggattgcaattcggttgttctaatttaatcagtctcatgaaataactcctttgctatcgaaaatgaaatcagaatcctttaatggttcaaccgttgcttttttatagccaacgcctttcattgaaaagaagtcatgtgatttagtctttgtgctcaatccattaataacgattggattaacatcctcttcttcaaaccaatgatcaaagcccagattgtttaatgctttatttgcgttgtatctgatgaatttctttacatctggagctaaaccaacctgatcataaacatcttctgtatactccaattcattttcataaagctcctgcaacaagcttaaagcccattcaaacaattctttttgcatctgaagagtttgtttcttatatatctcttgagctaacaatccgacataaacgccgtgtatcgcctcgtcacggataattaaatttacaatttccccgctctgcatgagcttcccttgtccataaaagtaaagtggataataaaaccctgagtaaaacaagaaactctccaaaaacacggacgctaccattgctttgaataaggaaatatcatcgtttttctgaactgcttcataaattgaaacaattgttcttgctttcttttgaagaaatttattgtttttaacccattcaaacacttcgttgatctgctctgttggagctaatgtaagaaagatgttgctgtaagattttgcgtgcaccgcgttttccatcatcgccatgaaattaagaaccgcttttcgctgatggccctcgacgtgctcggccacaatcggcatgcccgtgttcccctgctctgtatcaagcagtgtcaggccggcgagcaccttcatgtacgtatcctgctcatttttacccaaatacttccaagtaagaagatcgccgtttaatgcgatctcttccggaagccaaaactgctttacgttttggttgtaaaacatttgggtgaaatcatcttcatgctttgaccagtttgctgctgtatattgcgtcaattattcatcctccttctctttaacgaccatattgaattttttgatttttgctactaatccggacttcttcgtctctccacatctagcgaaaggatacgtactatctcgattccttcctagctttgattcgacgtatttatcgaaactcgcataatccgcccgctcccagaagaaaattttagcccattccggctgctcatcgaatgttatgctttcgtccttaaatgagtctgcacaagtatccactactcctccgtagatcctaaagttttcatgtgggtgcttttcactgacccactcttgaccgatttctaacttcacgactccgcctccccttcgtttaaactacgcaactcaagcacgaatcctggccggtatctttcgtccgcgcataatacaacgttttaatgccacgatgatgcgcgtataaatcaatccggttcagatcgcgcgttgtcatcgtatctttcaagaacagcgtaaatgaaatcccttgatcgacgtgctgctgaatagtggcaataagatcaactaccttaaacatatccatgtcgtatgcttccttataaaagaaccaattctgagccgataaacctggcattggataatatgtcttactgtttccgtatgtacgttcctcgattctctccataatcggcattacaccggctgtagatgattgaacatatgagatgcttccagtaggtgcaacagcttgcctatacgaatgatacaacccatatttcataacatcctctttaagcttcatccaatcttcaatgttaggaatatgttgatctccaaacaggcttttaaccttttcatatttagggctataatcaattgtcacgtacttatcaaaatactcgcctgatttgtaagttgatccgtgaaacttgtagtacgtctcccctgtttcttttgcaatttccattgaacgttgcagggagtagaagttaaccatcataaagtatgtatttgcaaagtccttagcttcttcactttcataagcaattttattttgagctaaaaaaccatgtagattcatctgcccaagaccaattgatcgcattagtgtatttgctctcgcaacagctggggcatttacaatgtttgttttccttgtaacagtcgttagtgagtcaattgctattctaaccgtggaagcaattgattgattgctcattacgtttacaatgttcatggatccaagattacatgagatatctaaaccaatttcgtcttcctgatcgtaatctgtataaactgagacttgtgatgcttggagcacctctgaacagttgccagtaacaatcccattgaaaatcagagagtgatagtcttcttgtgttgtatcataaacatcctcaacaccatcttcttcaatactaataatttcagccgtaaaatcatgctttggctttcttgaagaaggttgcaatgtctcagttagcaaattgaatttataaatatcgtattctttcatttcaacaatgctcataaacaactctcttgagtttctatcttgaatactgattttgtgagttggctttacattgtacagcttagaaccacctttcccgtcaggaaggagttcttgtgaacgcttattgttagaatagatcgttgtataaacacccatgtttagtaatagcttctgaacgtcctgaaggctctcatagtgaatggatgttaactcaattgttaatgctttggctttatgatttgcatttacacacccatcagtctggaataaacctgataaataagctgcttgcgtttccttattagcttgaaaaatgaattctgggactcttgttttagtttctttgtccataccgaacttcttcaagatgtcaaataagactgtactattcatgtagagtaaatcttgtttttctggattagccatattaaatgttggagccagtgatgtattgtgtttataagcacgatcgagcttgtgtttttgaataatacggtgaactgcatcagtaactttctgctcaagaacttttttgttatcgtataaataaatcttggcagttttttcagtaatggttccatccccagctataatgcccatgatgtaagcaagatctggctcatgaatgtcgccgtatgctccctcacctgattgaactaataatttatcgcccgtttttagctgattcaattggagcttttgaatttcaccgtcccttttcacatagaatttgtgccactcagttgtccttatttcatatccttgcttcgttttgactttaaatatttccgcatcttttttagtcaattgcattggaattgcatctactattgaagtacctttgctgccaactgcaaaatcttttgttctattatcaatgaccactttaagctcattctgctttttgtaaagatcagctgctttttcatatccattctcagttaaaagaagtgtttctccagtaacgcacaaattagaaaacttcacttttgaaatatgttcatttggatgcactttatttacattgtcagcaaacatgatatacggatatcctgattcgcttcttagaatggccaattgctctaacagttttcgagcatttccctttgcttttctaactttagggttttcaacaagctcatcatacattttattgatttccatctcatcaagatacttcccatattctttgtagactgagtgaggatagaacatgtaaaaatccttatcttctcttgccaattcaataaatttatcagggagaactacaccaatagacagtgttttaactcggacatcttcatctgctgagatttttttggtatcaaggacgtctgtgatgtctgggtggaatacgcttagataagctgctccagacccttgtctttgtcccatctgatctgcatatctaaaagcattatccaatagcttcataacacctacgacacctttagttgcattctctacgtctttaatcgcttcacccttggctcgtaatttgcttaggtttaatgctacaccaccgcctaatttagacagctgcattgaaatgtcaattgcacgagagatgtcattcaaactgtctcccacttcaagtaggaagcaacttaccatttcacctcttcgcttacgtcctgcattaaggaaagtaggcgttgccggctgatactcttgtttcatcatggcgtgtacttcctcaatagccttttcataatcaccatctgcacaatataaagctacaattgagacacgatcctcatatctctccaatatctttgttttgtcgtttgtcttcaatgcatagtcattgtagaacttaaaggcactcatgaaagaagggaatctgaatttgtaactgtaagcaatcttaaaaatcgatttaatctgctcaaatgtgtattcgcttaagaattcttcttcgtaataatcatttttagtcagataatccagtttctcttttaagtcatggaaaaagactgtgttctgattaatgtaatcaacaaagtagctgtgtactgcctccttatccttctcaaattgaaacttaccgtctttctgaatcatgatctcattattgagcttaatccactttggtattgtgtttgtcaataagttgtacctcccgattaatcttctgcaaatcttgttttgttccgcttagttcaaactttaataacaatggtacgtggaacattgctgagagcttgtccccagctaaaccatagttatcaccccaaaccttgttaccactcacaacaactccttttattttatttttattcttaataataaagtttaaagtcctttcaggtacttccccaaagcctatcgtatatgtaatatgtataaattcttcttcaatgattaagtcatctgtaatttcaatgacatcgaagtttaactccctttgtaaagcttgagcaaaccttttcacattgcctgtcttgctttcatatgtaataatcaatattctttatattctccgttaaccaaactgttggtggttgtttctgcttcattttcagcatgatgaaaagcttcagacatttctaaattaatgtctcccatttcagcatagcctttggccatttgagcttcataatctgataactctgtcattggtactggaatgtagttatccttctgctcttgtgtgataaccatttgatccccttcaagattagtcgcaatcagctctccttttaaagcagtgtatgaaccaccattcttcatatgtacttgcgtattttcttttgcttcatccaaggttacaaagtgactgcgcttaacgtataactgtttagcagctcccattccacaactcccttttctttattttttgtttttatctttgtcatgtcttacgtctaacttatccatatcatttagaatatggtcaataacaacatcgctgaacttaccgtagaccttatatccaattaatttgcttctcaaatctctccactttcttgctgcactcattttgcttccccttcctttgaaactgtgattttatctagaaataactgtagcctgttttggtttatcaatgtatggatcaatcgttttactcaaaacatactccagagttttgtatctaccttccttattttttttggaaacatagaagttcgccaagttcatccagactaatgctgaaaggatcattacctaccttttctttaaatgcagttaattcactgaatttttctttgaattctataagttgctcttgattcaaactatcgattttatatccaagcatttcaacaagttcaagtcttctgtgttcaattagttcccttaattttgatctcaaacccaagaacttttcgtcttttctctgctcagcaataaactctctaatattcattttcatcatcctttactttactctcaaagtttcttatctataatacctttaatgctttttaatgtttgcttgtactcgctatccaagccacttacatcaagatttgttgagattcgatagtttcctgagttgtcatacattgtgatgaaagcctcagtgtcatcttctttagcgctaaacgtgatatcatgaacgtcaacctgatctgcaccgttttcttgctttagttcttcaacatagtctggctgcatcatgttgaataactctttaactgtggtgaattttacttgttctaataagctatcttctttgtattcaaatgtctcaaaataaagattgaatgttatatagccttctacaagatttccatacttagtgtattccatcctatctactctccttttctgatttctcttacttcatgcggcactccactttcttcttgagcatacacagcatcattatgagcctcaatagcgtcatcataagtgttaacaagtgttcccatgcaataaagtccgtattttttattcattttcatcatcctttcgtggtctttgaagtttattgatactttcatacagcttcatgagctcatttaatcttatttccacttcttcaaaatcatatcgactttgaagaaacaacactctttcccttaatagaagcaacacttcactgatagctttatcatgaccaattatttctgcaattgaatttgtttcattaatcgattccatgatatatttgccctgtctttgacttattcccagatgaattcacctccttgtatttttatccgttaaagtaaactgccctcgattagtaataccatttcttcatcattagaaatctcttcaagaacctgcttaaatggcataagctcttcaccttctcccggaacccttccttgtcgtattgccgcataaacttgtccaacttcagtcatctcatcacttaattccccgtcatcatcagcaacttcttttgtatataacttcattgccttttcttttgagtaagctttaattaacgcataatagggatcgctcacttcgaagtacttcataacgggcttctcaactcccaattcctcaacgtaatcgcctttgatttttacatcatcaacaccgttttcgagtaaattatctacgatatcctttcctagctgttctaacgcagccccttgaacagattcactttcgttattaaatccctcatgagcgtaacaagttgcttttatttcaaaaactgctgctttaatccccatagccaattctccttttattttacttttgtgaatctcttgatctctttcccatcaataatcacttttccaaagaacaccgtcttggccttcatatgtaaccaacttttcttctgtttcagtgtgaactgcttctccaataaccatatataaaccgcctttataatgtctatcctgacaaccgataaaacaaatgtgtctattgtagctttcctccttaaacttcatctaaatgaaacacaagaacatttttatatggatctaattgaatttcattgcttgtttcttcaccatcaattctgaattgaattggtgtatctccgttaaaatcaagttggtcttgtagcgctttaattacatcgctaactttaggattaattaatttcccattgatctcatcataagccatagctattcctccttttctctctaaaatcatccttttattacgacctacagaactgtgaattcaattttaattaaatcagaagaaatgtcagttaaccttttccttgtcctaatagtctttgttttgccttgacaagttgtgatttctaaaatcgtaggatcttctatatgaatactagagtcacttggtttaagatcatctttatttgcaatctctaagaatacactcctttctccttcatacatttcacaatcatcaaaagtccctaccaatgttttttcatttggaagaaaaacgttttcagtcgttttgtacagttttacatttctcattttcattcttcttcatcctttcaataaaataaaactttcatttagacttcaatcaactgattggtatctaacctttggataggttgttttcatataaacttttttcatgcacaatgggcattgaaacggatatttcggtgggtttgatgtgagcatcatatttgaaaacacaagctctggagcttcttcgcattcatcacaatgtaacgtctctctaaaaactttaacttgctgcgatttaatcatattcagattcctccttcgttaaataaacaatgtactgacatacagaacaatcaatgcaaaagctgaatgaagtaaagacttaccggctttcttgaaaatgttctcatctttttcctgatctgaccgttttacacctttgacaaatacgttgagtaaaacaccaatcacaaatgcatgaggtaaagtgatatgggtattttgaatgttgtatgtatcaataagcaatgggtttaacacatgattcaatccataatagacaactagtgacatagtcactgcttcaacaaaaatgagtaaccccactacaatcagagaacctgatccgataaagaaaccgttccaaatatcttttgtatccttattcaataaatatctctcctttagtcttttttagtgattagcctcttccaccaggaagttttacgtttcttttcttgctctttaaagcgttcatagtcttgtttaacttgctgattccatttctctattttttcttgtttttgaattgctttttcaaggctctctttatcctcaattgttttaatgaccttgtcagtctgatatgtccattcattttttgtgttgcgttgcctgtctgttacgactacgtattcgttaaaccctgggatatacactttccctccgacttcaattgggtctaagtcgatgttcccttcaaaaaatgtctgatactcacattgctgctcgattgggacaagggcatcacacaagcctaatgtccaacttttcttaattaccttcccttcaaatgttgctttatgtcgtcccacttattcacctcctactgttgcatctctttcttaaaagcatgtttcaaatgttgccaaaatgatatccttttatttcctagctgattatcatgcttttcttttactttactttcgtctaaatactcccttaattgtttttcagcttgaattttactctccttattctcgactgtgctaatgacataatcagtgaagtaaatccatcccccatcaagcattttgacctttttttctatatgaacattttcatcaagttcatttatgtaaagagtgtcaccacagttaacttcaaaattaatttcatcctcataaaaagtttcagtagatatatctaaatactcgtggtcaatagctggtggctttcgtttcgcatggacgccatgaaaacacgatggatatgccctgaaaaggtaaatcttttctattttcttgcctttaaatactgctctacacttctccatgttagtttcttccttctcacatttcattaaatgccgttattgccaccaacagttgctttgcctcaacttctgctatttgatctccaatttgaacctttacccatgtatctggataatcaatactcttagttgccaggagtttcagagtttttctgtttactcctctcaatgtgaattcggatgtaatgtctctcatgtttttctcctttctttataaaaattgaattttaacctaatttctccaagataattttaagataatctttgaagtcaatagctacagcttcttcaccttctacacgtttctcatctcttacgccaaaaaaccatctatcacctacccactggcttgcagttatattatttctcccgaacacatcatggcctttgaaaggatttgcctcttctattttctctagcatagaccttatgtctgtgaaatacttagaacgttttttaaatgcatagaagccagcttttgtggggtttttcaccacttcatctttaaagaagtcatatgcttctgttcctgcgcgtactccgaaatactcggaatgatagaacgaaaaaccattcttaattccgtatgttgcttcgaattcatcaaagaatttgttaatatcttctcttcgtttcttctcagttttataccaattgctttcttgcttaatctcataaattggtgcatctaatgtttccatggctctatgctccttttttgtttatcacctaaagacatcatttgttccaatttgtcgcatactgcgctttcccaggaaatcatttatatttcctttcactatttcccttcatcttgttcatatcactgtaagaataaatccgataaggagcgagcaagctcccattaagaaaacagtgagataaaatggcaaggcttctttaaagtttttattctcaactaaacttgtaagtccattacctatgaatattgaaccgaacaagattagtcccagcaccaaatatgacatttcattctcccttcttataatggactagattattactcatggtattcatacgcctcttgaactgcattaaagtcttcattatctaaaacatcctttgctacttggcaccaatatcctaaatcactaaccgcttcaactagttcattaattgcttgatcctgagtaattggttttgaatctaatatccagcctccattaacagttctttctaacgtatgagcaccttttttatgtaaacaaactttcaatttatccatttagcatctctccattctcgataaaaggaatattttatttttactcttaaagtaactgcaagtaatccaatgtcttttctaatttcatgtctttacaattttcaatgcattctttcttgattgcttctccgcattctttatgtaccgcgaattccttatattctttgttgtcagctattcttatgtaataaacgatttcgccaatgtgatccttgcatttaacacactccaatgcatcacctcgattcttatatttctaatatactcgcattctctcaaacaatcaacaactattttatttttattcttaaaaagtttcttttaaatttcttagctttactgttgctgccaaaatatccgaatcacacctcttccatatacggttatcctctggccttaaattgttctctaaataaacccaaagcttatctaatatttcctcaatctcatcaacgtcattattaatgatatccctggcagtatccctaattatccgatacctcctctacgagaatatgattatagctttcccgttgtcattctttatgtacggcgaatgttttctctgaaggcaatttgtccccctaccttccccaatgctcacgttataaacagtctttaccttatgtatgtctaatgccttccgtttagcctcttctgtagacattgcttcaattaccaaagacgcgttttcgcctttgtgatctttacatctaacatagtaccttttcaataaacatccctttatcctttcttgttatcttgttgtattaatcttcttttagataagacttgaagaactcatctaggtttgcagcaatcgctccagcaacttctgcacaatgagcatgactcttttcttgagatcttaaaaactcaactgcagacttagcaatggcttttattttcccctcgtctaatttgccgcttcttacttcatctttaattttttcggcttcctcttttaagctttctgggtagttcactacagactccacctcttatattttatttttactctttaaaagacaaattttatagcgatttatataaaggaaaaacagtcctgtcaacctcatctagataaacctctatatctctcctatctagattccagaagacatttttcacaataaagcacctcttatcatttatatctgatgacagatctcctcctacaatatagtcacctgtacgaggcaccattgactctaatcttaggtggtttccttccccatccttactatatgtaagctcactcaaagaactgccggttttacaatcattaaaaataactaaccatctaacttccatttcacaccctcatttcgataaaattgatcttttatttagatcaccaaccgtaaaataatattgtctctttctcaaaatctatggtttttaataatctgaccagctcaaaaatactgtattcatatttccaagaagatgttagccatgaatcattaatatccgtatttaacgcccatcctctagtccactcagataagttgttcttaatatgctgctcttgttttactgaagcagttccatttttatcatcaataagcaagttctcgtacattgcaatgactttgtttttataaatttcaatagcttcttcaagcccttctttaccaacaatatatggaacataatccgataattcattcataacttcttctctttcaaagagagggtgtccctttgaataaatgcggtcggctgtatcatcccaatacaacttcccaaactcccaaatttcctctttaggcaggttacctatatagaaataaccttcttctcctattgcaccgaactttttggacaattcattgtaattcattgattttatttcgtttacaagttccttgctgattttatacatataatgtctataacccattacagtctcccctttctctttaaaagagatattttaaacagtttcacaaacacttcacacatttcaaatatttaacatgctagactggagatgtaatcacaatcaaaacctaggaggtaattcttatgaaaaagttttacaaaggattgattgtttctgctctattgcttacagcactagcactccctgcattcacatcacaggcttctgctttaacccctgtcaaatcaattgatcaagttaagcagctaggtgatccgcttggtacagttgattttcacatgctgaggaattctaacgtatctctattaaaaggctacacccgatgggaaattgtatctggaagcaaccttataagcattagttccagtggtgtcgtatcctctcattcaactttgggcacagcattggtttacgcgtatgacattaacgacaattatgtgatttataaaattacagtagaagcacgttagtttactaaggagtgttaattcactccttttaactttattttcactctaaatataatgatattttaaagtaatttccgttcaatctcctcccaattcataacacgaataaatctattgtcattcctgttatgcggtgcatcaaatagtatcttcattccatcaaatgtttctaagttatgcactccgtcatcaatcatgatgtctgctttaattatgtttttattgccacaaagcacaacattactatgtggaatatatggaaaatgctctgtgagccattctaactttgctttaagggattctggatggtttgttgctgtagtaacaacatatacttcatatttcttcgccagctccttaactgctctctgacttccttctataacatccagatttctgaataattcgtaatccaaatgcctgtaaacattgttttgggtatttgaatatttgctaatatcccagcacagtatatcttcctcttttagaaaaggatcatcataggtgttaatgtaggctacccaatcacttagtaaatcggctaaaacttgatccatgtcaattgcaattactttcttcataaatcaccccatccgttaaaaagattatgcctttagcaatttcttcgctagaccactgttctgtatcccatgaatatgtatgtaacccaacatcgctcattacttctctgtataatcctaataccggctcaatatcacgatcatttatgtattcgtcaccacgttcaagtaaacgctgcttaataactttcggatcagcatgtaagtagatcaccttggctttatccctaatcttctcctcgatgaccctttgttgctcttccgttaagattgagtaatccttgaacttcttcgcataaactaaatttgaatatatgtatcggtcaataattacattgtcctcatcagccagcttgctaaagtgttcaaacagcttctcattaccgctcttagctaattcaaagctggatccttttattaccggatatccgagttctttgcttagcttatctgctactgttgatttgtagcagcagtcagtgccttctaaaataatcatcgtcatttatcttccacccttcttacattgctgaagccaatcactctatatgagccgtctggatactcaacttctaattgctcatgtcctttatcaacttgtgcaacaacaccaatctctcctgtgaaaccagcaatcaccttctctccctttttaaacatacaatcaacctcctttagctggatttaattcatgctccttgaagaatgtaatatcacctgtttcatcactgactgcgtaatcatatgtggcagagtgtagcagctcaataattttcccttcccgtccaacatgatgaggacaagcgttctttgcattctcatttatgatgacttttaacccttctggataagaccaaaacttcggcaattaatcgcctcctaactaataattgagattgtccccttttgcttgccaaaattaattgcgtcacgctcggttgctacaagcaagtccactttatttccaacaattgctcctccagtatcaattgcaattgctttgaactttttcccaccaatgcttacttcaactattgaattcaagggaataacactagggtcggttgcaataacacgataccctttgtaatagattgattgagtgacatcaacacctgttctagttgttcctgtgcatccttcttggcagtgggcaatataagcactcagcttaacctggatggttttctttgcggccggtggcttgttttctttttctttaatactaattttatttttactcttaaaaagtttatgctttaccgtctcacctcccttcctgtgcctttttttactttgcttaggtttaatgagttttgctgagataatcttctctgtatgcctttttaattgctgttctttgttagtttgagcttttttaaatagccgtaagacaatattctcacttgatggtatcctaatctgtctaggcttcttataaaatgattcttttattgagtcttcatttccctctgttttatgtaaatgttgctcataacttatgtaagaaaaagtggttaagggaatcaaaatcatcataccataaacagacttgaaaatgtgtgttttaattttatttttactcttaatggcgatgcatatcacttctccttctttgttttctttctattcgatattcctaaataatcatttattcgttttttggctatctctatgtaatattccttatcaagataatcaggaacttttaaatcaataacgttatcattatttataaagcagcgcggtggagtatttccgattttttcaattcgttcttctgttttaaccttgaaaacacctttagcatcttcatcattagaagcaaaaactcttaaaactttttcaggtagcctttcttctccatagagagcgtacatatatttgtttgaaacctttgatatcttttgaaattctcttaactgatcacattcattgatggttttttcaactggaatatcttttgtaaaatactcaatcatagctttattaacaattggtaagtcataatccaggttgtttagttttttaacataagcacctttagatttatacttctggtctttatcaatgattatatagttgtttacatccttctgataaatcttctcataaacatcccactctaaatctaatcgtgttctggtttcccactccttcgccacttccttaattaaatcaatatcagattctttctcaactttcataaacaacccatcagtatttgactgaatcagtttacaatacggttcaattttctcgatcaaatctaataacaacagctgcccggctaaacatacgttattggccattaacgggtcataaagtggattatactgatctttcattgctccatacgttgagtttaggacgatcttgtagggagcctgcttaggatcttttttgcgttttaattctaaccgtgtatctctgatttcagtatatttcaaagggtttttcacgttacgactgatgtaatcatattcaatcatgattgaaggatatagagatgcaacatcacaacataaaattatcccttcatctttatactttggtaatgccccatgtaaacctccccaggcaaaaatatgaggtacacctgcaacatcaacctttaagttttttttataatctagattttcaggatttctataccaatcaacaatgtgtttgtatttttcaatttttaatgtattaggaaatctaagttcaaactcatctcccctgtttccttgcttttcagcccccaagataaatgcagataattgggcttttgtctttgtaaacatagacatttctaaatcaaaggcttcaattaaagccaattgactttcgaattcctcttttttattatcaaacacttcaattgtttgtttcacatcgtgaatacagtactcaacaacttccttaatttctttttctgttaatgctcttgcgatatcaaatggtactgatgactccttaatccttgaacccataaagccttctagctgctttaagctgtggaaaccagttgttatgtcaaagttattcagtgggatcttataaccttctctaacaacattaaatccctttacattatcattaataattcttgaactaatataataaggattcattcctaacaggattccctttaaaatgtattggtcgtacattctagagttgtaaccaatccaaatatcatctttaaacatcttatagaatcgtttcagttcatcaacatcatctacaataaccttaccctttttagtatcataatcgatcagcacaaccatccagttatgtttaaaaacttcaaagtcatagaatatcttcctcatcattaccccctaagaaaataggttatcaaacaaatcggtcttatcctttttcttaaatttatttgatgatttatttaaaaaatccttataaaacttgcatgtttttcggtgaccacataagacactgcaataaaaggaattgtatttatctattttcactggttcccattgggtttcatcttcacggtctttattttcaatctttttaacagtaccagtaatataatctttcagttcattaattttctcttcagtaacttcgtattcaactaaacaatcttcaagccaatacttatttctaatctcggcaggtaagcagtcaatgctattttcttttactgcgttatctaacaataggtcaatttcgaaatcatcatactccaaagtgcgcatctctttttctagtttcattcgtatttcctttacccacttacctctgttacacattttctttttcactttggtttttccttgggtacatacataaacgtatttcaccatgaaccatagtattttatctacttttaagtcagttgtttgctccaatgcaagcttgtacatcaatagctgtcttcctgcttcatttaatttcttgccggcaaacttacttgatgtcttccagtcataaatactaacgtatggttttcctttttcactgggaaggattgcatctacatatccttgaagataaatcccatctgatatttcaaatacaagcagcttctctaaaaccattttgctgtcaattttattaaaattgtttaggaaatgaccaatgtctgctttccagctgtctccgattgagtcactcggaaagttgactccattcagctctaattcaattaatctattttcaaatccctttttaaattcaccaatgtctaattcatttttataaatctgttcaattccgttatgtaattcagaacccataagggtgtaaatattatctatgcctttctttttcaaaacgtatgtattgtagtattcatattcacagttattaaaggttccaagctttgaaaaggaataaatgtttttcccttgttgtctcaattcatttaatgtttctttcaatcaatcatctccttttcatatccaaactgtacagtctctgattagacggtgtagagtgcttttatcaaggtctgctggtgccatttttgatcccttaggcagatacttgttttcacgatcaaatatgtacccaacttcattttcaaagaaattttcaaactttaggctgttggcaatttctacgctatgttcttcacctaatccttcatccatcatgactaatgactttttcggaaacattgattttatgtgatttgcttgaatttcacttaaaaagctgcctcctaaagaaactccaacattcaatcccttacttgctaaggccattgaatgtttttcggattccccgatcataacaatgctcttttctctaattgaactgtaattttcaacaaacccgtatagcgttttggacttgggaaatgaaataataggcagccattttgtttcctcatcattaacttccttcttattaagacgccccattacaccacacaattcaccactaagagatttccatggcaccgttattcttccggaaacactatcgtaaccaacctggaacaaagattgagttaaaggtaatattccatcctcataaaacaacttatttggaacagatacaaattgatctaaaatgtcatcggaatacgtttctagatccaaatccattggattacttagtcttcttatattcttataaaaacctccgaatggtaactcaggtggtttatattcttcttcacttttataatcaactatttcagatatccttttgattgttttgggaaaagataaacccaatttattttgaacaagtgttatcaagtcaccttttaagttggttgaaaaacaggttgcacctaaagtggttttatttacttttactgaagtcggatttcttcctttttttctcgcacatctgtactcattcccgcgttcatcaacattgtaaaaccccgtctgttctaaaataagtactatgtactctggcttttcaataatgtgattcttaagatcatatacgtccatgatttcaccgtcccttggtaatcatgtccgctctgtagttctctgatgtttaggagtacaataaccgagctcattccatttattccatgcaccgtcaaattggtataacaacactgtatcgccttcgtcattccgtgtcttattcaaaaagaataatctatacttcttatttgggtctaactgaatttcttctttaatgtttgtaaattttcccgacgagtcttttttgaatctatagggtttaacatcgaattttcctcctgggaattcatcctcccataaaggtcttgttagaactaactctgaaacaatctccttaactgctttggcatttgataaacaagacgctgttagatatctcgtattctccatataaatggccaactgcattgtaatgatgatgcaaatatcctctttttccgcaacttgcaataactgttttgaggcttcaattagctcacctgttacattggttgaagccgcatcttcagctttaaatgtatcgtaaagcatataaccgaagccttgttttgccattcttctcattattctctttacatcattaatgctgtaatcatatatcttggcaaatttgatacgccccttgtaatgcttctcataatattcaattgccttttgtaacatttccttttgctcatgctttaggttgcccattttttgtttctttcttggcaaaccataataaccaagtttatgacttaaaattgttgccataaaaatatgttgccaagcccttttattcatttcattggcgataattgttaccttttcaccctgatctaaaattgacatgatataagaagaaacacaaaaacttgttttccctgtcccactaaatccagcaaaaatttgaacattagatttatgaagtccaagcgtgtgataattcaataatggacatgcagctgaatagcttaatcccatttcttccccgttttcaattgattcgacaaactcttcattcaaatcaagatcctcaattttcactcctgaaccgcgacctagaaaaacattatctaattgaaattcaaagtaactgtacaattgttgactcgtcatcttcttgaatttatcaagctcgttcgaaacattgaatcccttatcatgaagctttagtatcatgttaaatttaattagttcatcatagtatgtctcaacattttcatcgtttagtacgtgcttgagttcatcaatggttttcattccacctcgccgaataaaaccattttttaatgtttctttaccttctatgtagctgaaaacactcgcatcatcaaagctcttataattcatgttgctcagttctaaacctagagagtaataaaatttcccgtcttctgttagaaaatctctatccgccctcacgtggtctttataatcctcatacaaatcagggtttttccataaacaaaatataaagcttccttcaatttgtcccctgttttcaactaattcctttggataagaatctaagttgttcaatactcgtcctccccatccagaaactctgttatattttttggtgaattgttttgttttaaagatgtggaatcaacgatattagtttgatttacaattgcaatatcaagattatgatttttttcaatcattctctgattttgttcatgcagccattccttataaacatcattgatgttactttcaacaatcttaaaaatatagctaatcatcccatactcgttgtaaaactctttattagttaaccaatattgaattgtttgttggttcttctcaaagcaaatttgtatcacttcataatcataaaatctttttagttcagctatcttttttagaaaaattggaggaatgacttgaccctctctataattcaagacatctttcgctatgtagtttaagaggttttttcgtttcaccttatcattgatataggtttcatattcatccttagtacagtagtatttatttttccccttatcatcagaaaccctgaaaaaagtatcaacagttccattagctttacatatttgacatacacatcttctggccaagaataccctctcctattgataagggggagactccccctcttttccttcagttagataatgcttcgactatcttctcgaatgctgtagttggtacaatgtctacacctttaaaatctttcatattaaattgatccataattttcttcatttcacccttagcttcggcagttgcattagggaatagtgtcttaatctcttcggccaacctctcattctcttctttatcaataaaagatgagttgttaacttcgttgtgaatttgaatttctttaatttgctcttgttcttttctttcttcttcaatgttatttgtattatttttttgtttatcaaaagccacatggatagcttgttcaattgctttaataaattcattcggatctaatggaattgatggtgtgatatcggagaatcttgactttgaatcaatattaaagttgtcatctctaaaagtgatgattcttgattcatcaacaactgttcccactgttttgtcaggcccaattttttgttttactgttttcttttcaatcgaccgattaatagatgctactcctaaaacgtgcagcttggttttaatcgcattgaagtatttatgtgtcatattggttgtcagcatgtcgtattccaaacccgtaactacgtctgtcattgttcttttcttcgtatgacctaaaataaacatgctaataccgacctttttaagttcccacatcttctcaagaattaactcaataactttgtcttctcctgcctggaaaccaccaaacgctgctttaattgtattcactcttttttcaggattagctttattatgtagtcgaataacttctggttctgtaattttaattaactcatcaaatgtgtcatatactaaaacctttaaatctgcataatctgttgttctgtttttaataatatctttagtaatttcattaaaggttgtccaatcaggaacatcttcataggaggcatttgggatggcatcgatgccatcctctttaccaatattcaagattatatacccatctgctccgactaattcttcgcaaacttctttagctaaagttgttttaccgatccccgattcaccaataattccagtgttataatcgagaggattaactttaattttattctttttaccaaattttcttgccatatggataaacatctccttattgtttttaaataaatgtcagttaggtcttttcaaatcaagcaaataaatcatcaaatgcattatctttttcttcttcagtcactttaggttcttctttttctacgggtggtgtagaattttgaatctgttgtggaatatatgtaagatcttcaatttcatatgtagatgttgcagcaccttctgtaaaatcattagaatcattaatcttttttaaaataggttttaaaagtctattttcttcacgattttcgcccaatagccctcctttaggtttaaagtcatctagtgtgtttaaacctaaagcaatcatttccttttgactttccgtgagttcctcttcggtaaactcaatctcatcagcacccctgaaaatattcacaacccattgaaggtgatatacttcatcattttcaactttaaagaagtttttcaagagatttaatcgtttcatatgtaaatcattttcaaagtccaatttttgtgcattaatgactaattgctgaggaaaaaatcgatctttttttgcctgattatcatagctaagcacatatgcatcaacaaagtaccttttttcttcttcaaatgacgattcatctaaagattcacttgtgaaaaatacatccattgtggctcttagttgagatggtgtatcactacttacaatttcaatggttttgattttgaactttctaaaattccgtccattccatgaattgtattcaatattacctgtaattttaaatttattgtctttatgcttttcgagattttgggataagtactgaatagcatcgtattcatgaatgaattctgcaccgtttatgtttaattgtttatattctcccttgagagtagataaagttttattttcttcttcagtaagagagtctttcatttccaaccctctaattttaaacttcaattcatttaatttggtttttgttgactcatcgtttaagttaattaggatcttagaaaaatcagcaaccatgtttactgtttcttctttcaaccgatcttcccatggaatttcgagtcttgatcctttttcattttctgtacccttgctgaatgaaaacactttattttgtttgctttttgagtaaccaccttcaatctcaacaaaaacactgtttgtttttgactcttgaactgcgaagcttaatctttccttaacccatccgctgtcatattccttaatttcatggaatttctctttattgtttgaaataaataggttaccgataaattcaaatgtattataaagtttgctcaatataacgcctccgttaatattatattttatttttattcttaaaatgcctataatgagacttgctactaaacttacaatccttgataccaagtagcttgtttaattctatgtatctcttttttggaaagtcccaaggttcaggatcaccttttacattttcaatccttattactgttccatgtcgaattgtgatctttaagtttccatatgagtatgttttagaaaaaagacctcttttaattcctcttggtttaaattcctttaccaacatcacattcctggttaactttcttcttgcttggtcttcgtcaatgtcgtaattccttttgacatcatttttgtaggtatgtaaggcttcgacagatactttcagtatctttaattcctttttcatctctttcctcctttctctctttgggataacttaatcttacatcaccaaaacggatcggtcaataactattttatttttattctcaaaagttttaaaaagagttgagctactatctgcagctcgacaaagtgcttttatttagctggaaaagttgctaatccttttaaggttgttatcaatatgttttaataaatgaagtttttcattaaaattcgtatattcctctttagtgattttctttgctaattggtattgacttgaatctaattgaactttatgaccgagtttatctttaatgattacatgcttaacattaaatatcctgtatacttcataaaaagagttgatatctagatcatcatatttatttgcgctattgccactttctttaattctattgccatcaatgtctacaggtcgtgtatcgattggtttcacaaaatcacccaatcgaggccttctattaagagttttaaagtaaaccgtttcaccgtactcgttttttgctgttaagaaattcatcagtttctcctttatcgacgatattttttagaatacctcataaaagaagagccgcttaaatagcaactcaaaatgtttatcttattagcctcccactctaactcccatgactcagcctccaatagaattgatggacataataccactcctttattaattcaattataccatttacaaaggagtttgaataatcaaataacctcactccaagaccacatgttcattgtttgcagcgtaaacccatcaggaagctttttcattttaacattcacattgtatctcttcccagtagtcttatggatcacagcaagttcttcaccatcatagaaccgcacaattgcttcattaaattcaattggctgatcaaccacataaccttctttaagcgctctgatatacagataagggtctgtcttataaagctcatatagtctattaccaaagtcttcgtgtttatctctaagcagattaaaattaatcagggatatgtacagtttttcagatatgttcagcttgttcttgaaataccggattgcttcatcttgttctttggttaaaatattggccatatatccatctcctaaacttgttaaaactacagttttatttagaccacaatatctccttctgcagtcttcagtgttccactgtcatatgtgttataaattaaggttgtattctttgctttatctgtgcaatatgggtgggataataacttgccaccaattccgcgcacatcgtttcttacgagacgtaccttgtttgtattctccaaataaacaccatatccttggtctgctgaacgattgaacatgatctcattatcctttaatatatgttctgaaccaccagtcagttggatggcgattaatgatttacagaaataaacctgattctcactaatctggcaactgtatttctcaggggtgcctttaattgcaacattcctaggctcatgaatttcatttcgatgcagtgagacagaagagtctttatcccaaaagatgccgtatccactcccacttaacaacaagtcatttccctttaaacgaactgactgagacctttcgcaataaattccaccatatacattagcaaactcattattaacgagactgattcgggtagagtccattatctttgcagcataagacgagctcgttccttttcctttggtattcacaaccttaatatcatttgagtttctaacctggacttgaacacaatcactgttttctatcctgttgtccgtaattaaaaagtcctctgcttgatgtgttgcaatagggcatgcttttattttttcaaaagtattatttgatactgtgccaccctttcctcttacacaaatgcccacttcaaagccactaatcgtattgccatcaatttgaactctgtttccagactcagtacttgaaacacctaccgagtcaattccataagtcttaatttcattttcattgatgatcttgttatttttgatactgacatccgtgctatatccataggaaataacatggtcgctgtagtttccttcaataattaccttgccgcttgtgtgagctgtaacagatccacgtccattgtttttaaatctgcagtttcgcacagttaatttatacgggtgatcgtatttaattccgttttctccaaagccctctaaatcaattcctaattgtggcccaattgtatctcctccagcttcctctatatcacagtcatcgacaagaagaccttcacaaccattggtagccagattatttcttcttcctcttaaaagcgtacactttcgaacggttacattctttgaaggcgtatatgttcctgaagtgttcatcattccatcagccgctatccaaatgttgtctccaatacagtcagaaacttgtacattttcaattagcacattgctacttccattaacatggataccaaagccccattcatgcgtcttcttaattgaggtaatttttgaataatcatgctcatgtcgatccccaataatttgaccgccacgaatcgtaacattacttgcttggccgatataaaaacaggagtaaccctgataatcatttggctgcactttaaatatagcctctggatgaagtattagctcaatattcgaaggaacattgatacctccaccgaattcaggtaaccgctttgacgtattcactgcatcaattaggtagataccttttggaacatatactttatagaatgattttgagcatgcatactctaaagctcggtttaatccttctgttgtttcaattgcatttgaccctttatcatcaattccccaatccagagcatcaacaaaatagtataagggctgttgcatgttcatgttgtcaaacccttcccttctacattttcattgagaaaccctgatagagtgtcaatgaagttataaaaagtctcatttcttgtaccagagcgtcctttcagagaaaaggtgttgaacattgatttgcgtagtccagtgctcaattccagttgaatgctctttcctgttttatttttattggccacgttatttggactgctaccggatagcctcgtaccctcatctagaagctctgcagagtagccggcattatttaatgtacttgttatcgcttcagctttgtcccggtctgtgccgccaactagaacatgttgatcattacttgcataaccgtgaagtgacaatgtgaactcatgccccttcaacatttcaagtgcttgtggttcatcaaaattcgtactggttaaatgcaaatcaaaggctcctggtgtctttaaagcttcaaaaagatatgtagagtatgtttcgcttaattcctttgcaagctcgcttgttcccccttctatgccacctccatggggagcaagaattaatacatcagtgtcttgctcttttgagaacacgctaaaattgaacggtgattcattcgctttaagctcttcaaagttccgatacttgtccgctgctaagatactgattggattcatgaacgaaaccaatgctgtcaccaatactggaaaagacttcttttctgtgatatactttaatagcttcgtaaccttgcgaagtgtgcagattagagtgtaccgtccaaagtctctcttttctgctcctttagtcttttttagcaattcctctattttgtttttaatcctcaacaattaataaccactcctttttatttttgttttatttttaaaactcaaatcatataaatcgatcacatcgttatcacccccttaaataaaaaattacttttaactgatttgtcttaactgttcactcatataatcaacccattcagtaaaagcactaattataggttgtctattgcctgaatctgcccaccctgcgaaaccaataaaaccatctggattaaaactaattgcttctctttgagtaaaatagtgactgtttatgtaaagataacaactttttaaagttccatttgttttgtatttgctttttattttctgactcattctcattgtatcaacagacattgtatgtgctttaactgcctgtttaacatgcttattgagtagcataactaaagcacaaatatctccctccgtaatgtcttcataactaagtcccttttgcacaaaataatttcttgcttcttctgaagtcatttaaacatctccctatctggttaaatatcgtttttatttagactctataagctcaggatcttcgtaaatgttgccgatgacttctgctttgctgcatctgcagccagtatcgacatcacgagtattgtccacataagcaaacagtggcctttctccgatatagaagcccgcataatcttcccgatactcaacttctaagtattcatcaatatctttaggtggtttgcctgaaccgtacatgacaaccgtgactgttctttttaaaatatccccctcataaatctctcggccgtttttgtcttttaatccggtgtattgcccaactgtttccggcctgacactgtaagcaaatggaacaccagctttattagagatataagaaccaggatcaatacccatactcttgattctttgcttaatgattgataaattgccgtaataccattctccgttgatgcccattcctcgaaacttgatttctctcattcttccgcctccatttattatttagattcttttcttacccattttctaaccttaacttccttaagctcaacttcaaaacactcaacctggtcatcgtattcccatggtctctcctcttgtaactctgtagcgccttccctgtaagttgtctcataaaacttgtcttgatatgcaaacacaatacgataatgaatactccacctagacgtatcagtgatttcttctaaaattgaggattcaggcagccgcaattcatttaccatgtaatctttgtccaatttaattttcacttaagataacccctcttccttcgcagcatttacattcgactaaaggctcattaattttatccattagatcatctagaaatttcttaatattgccctttaaatcctcaacatctttgccactaaacggttctacaattgggtagctctgataggctttaggtgcaacattgtaaatttcaacttcccgctttgtttgaaatcttttctcaagtttaggctttctacgtttgtacattgtatttagatcaactacgtactcttgaggtttgcaaagctccaaaactttgaccacagttaaacagaaatcataatcactcgtgattcttgcaaacttagggtttatattggcttttatatggtttctgataatcttatagctttcttctcgggacaagtaacacggctttgtttcaagaagcattggatgagtttgaattctatccagtaagttataattcaagttaaaattatggctttgcaacttaagttctccgtcaatttcttcaattacattcatttcaaactcaattttttgattctgttgcgggacttcttcaaattttaaattatatagacccttcacttcatagtattcactgtcttcacctatgtaagaagttttaattacttgtggcgtcaaatcagtttcctggaacccctcttttaattcatacctatgattgatttttttagcaggcatttgtttttcaataacacttggctccttatcaagcttaaaccagtctgatttatacgtttcagttgctcgtttcccatcgaaaaacaattcatctaattgactatgaaaatatttctttccttcaatattgtcagacaccaaaaaacagttacttgttttaataccaattagcttcatcaaatttcccctttttaattttatttttatccttataaaatctctgttttatttagattcgaaaagctcagtatcttcgtaaatattaccgattacttcataactgatgacagtcgggtctgattcgctttttaaccaactcaaagcattcatctcacaatcaatccaaggccttaaatcaaatgctggatagttttcgctatccaagaatttaacttctccaacgtaataaggttcttcagcccatgtggtgtcgaaagtaatccgaattatatccccttcataaatctccttgccgttattgtccttcaatccggtgtattgtcgaaccgatttcaaacttttatcagcaaacgaaaattcatcaccgtctttatctgtaacgtaatctatttttccgttatcaaaagaaatgtcatgaacatcaataatttcttcgtaactgtctatacctgcccaatgcatattagaacccaaattgcttaatgtatgtttaactaccaacgcctgaaatttaatatctctcattctctccacctccttttattgtctccactcaaaaccgatattaacgtttgcttgtttaggtctgataacttcaactgtgctacctctgttagacagcctactttttaattccttcatatccttgtatggcgctatttgcaaggtgctcagatcgataagaataacttcatgtttatctttagcggcatactctctgtctagtgttctaacaatgtatacatcagcatcatctattttaatgaagtacccgtcctctaaatctttcacctttggcttatctgctttgttctttctaatctttaaattgatcgccattattctcacatccacttattttatttttatcaaataaatcaattatgtaggcttcgtacatctcatcccaataaggatctgttcttgctatgtatttctttactcttccattctccacaatcttaaaggtttgccccttttcaatatccgtgaacttcttctttgtccatatccctctgatcaacactacaacttcttttacctcaactgtttgccgctgcatcacattcctcctttttgattttcgtgtatcaagcctgtacaatattcaaaaaaccctaaaggatgatgaacatgtgtggcaggttcactttattttctgagtttgacgacatcatcgaacagttcaatatagatcaatttttgtctgaagacgcataccatccaagttataatgtagctccttcacagaacatcctgacaatcattaatgatggatcaaacaaccgtctgggtaagctaagatggggtcttatccctccttgggctaaagatgaaaagatcggctataaaatgatcaatgctcgagctgaaacattggccgagaaactttgcttcagaaaaccgcttgttagcaaacgttgcatcatccctgcggacagtttttatgaatggaagcgtcttgacccaaagactaaggttcctatgaggattaaacttaaatcatccaacctctttgcatttgccggcttatatgaaaagtggaatacgccagaaggcaatccgctatatacctgcacaatcattactacaaaacccaatgagttgatggaggacatccatgatcggatgccggtcattcttactgacaagaacgaaaaggaatggctaaaccccaaaaacaccgatcctgattatcttcaaagcttactgcttccgtatgatgctgatgacatggaagcttatcaagtttcatccttagttaactcgcctaaaaacaactcaccggaactgattgaatcccattaagtaccacagtcattttgctttatatatcaccttcgcttagctattatgttctaagtaggaggtgatattttgtttgtatcgccaatgttattgcattcaatcaaagaaccatttgatgacgatgattatattaccgagctgaagtttgatggaattagactgatcctctccaagtttaatgatcagataaagctttatactcgtcacaacaacgaagtaacaagcaagttcccagaactgttagatcttaatatacccaatggaactgttttagatggtgaaatcattgtagctgccccaggcggtgctccagatttcgaagctgttatggaacgctttatgtctaagaaatcagctcataaggtggtttactgtgtattcgatgtagtttatattgatggtcattcaatcgctactaagccactcactgaacgtaagagtatgctttcagacctaaaccttgaccatgataatgtatttgtaatcgaaggtctacaaggaaacggattagcttactttaatctggccaaagaaaagcatcttgaaggaatcgtactaaagaaagctaactccccttatgaaatcaataaacgttcccatagctggctgaaagtgattaattatgattacacagatgtgcttatcaccggctacaccaaagaggatataaaatttcttctgtcttatcctgatggtactgcagccggaataatggaattcatgccgaacgcagaacgaagtaaattccactctatgaaacatgtaaagtctgaaactgacgaatatatatttgtagaaccgatcttatgtaaggttaagcacagatttaagactaagcatggtaaactccgcataccttcctttgaatcctggagagtctaatctctccgttacataattccttagctcaaagttaattaattttgatgaaaatttagtacatgaatcaattagtttaacttgcccattcagcaaagctgtaggggtaatcaacactttcaatgaaaccgatctccttcgccttctgacggattttcatacaaccttcatagctgtaagcccatatttctttataatccctcagctcgccgtatttccctgttatgatgaattttctgaagctgttgactagttgccacatgttgcccccatgcgaaaaaccatttgcacgcccgtatcccaattcatatgggtaaacgtcagcgcccgtgtaatcatcaacgaagaacagttttttcttaaatctgaaatacgctatccgattctttgacttacagtagaaagtacatctatcaatacttgcgataagcttgatcaaatcgtttatgtcgttcattcgtttcaattgctctgctgttgccatctgcgcccttcccttctataaataactattttatttttattcataaataatcaccaaatgtcatagcctacaaaatcattcaaaatattcgtcattccctcatccccttcttctgtcaatccatattcatcaagcctgcttatataatcttctcgttcttgtttgatcattttttcacctcttttttatttttttcaattcttttttgattttcatattacttttcactcttttattaatagatgcgtgtcatacacatgccatctaagagagataggacatttttgtctcgggaggtgaaatgcaatgaaaattcttatggatctcttcacaacttggatttttgataaagtcatggattattcactaggtgctataatttggtttgtattcaagtccaagtcaaagcagaatgagtatcccgaagactttgaggaaaagcgtcgattcagactttaaattaactgactcgtattctgatcgctatcgccgagcgtaatgacttccgtaaataccacctgctcgaccggcttgataacggcttgcgcgatgcgatcgccttttcggatgatgtacgaacctttcgcaaaatgatcccaagctccgaggtaatcgagagcactgacgattttatctctgatatcgaaaagaaagtccttttcaatatctgtataacgatttatattgtcgacgattactccgacctctcctcgatagcccgaatcaactgttccgagttgcacacgcagtctagtattcagcgtaatgcctgatcgcggacggatttgcatttcgtatccctccggaatctcgaacgccaaacccgtcggcacaagctctgcccagcccggttcgataataacgtcctctgacgccactaaatcgaagccggcgtccgttgcgtgcgcataagccggaatctgtgcgtccggtgataaccgtttaatatttacgttcatttcgtttcctcctaataactgattaaaaattatcttttatctagacttgttcagctctctctatcatctctacaagctcttgtgccttgtttaattttctgctgtagtcttcaacttctttcttcgcgattgccattttatcaaataaaacgcgccagtttccattaggatttctgctgaatgatttaacaattaggccattaaaccagacgtctaaaattagtctgctctcacttgtttcaggtttatgaccaaaggcagcatctttattattaccggcataaacaatttgtttatttatttcatatagataattttcagtttcttttgtaactacatatgtattcattttcccaccccttatagattgtattgactgtctttaattgaattccaatcaaacgtttcaagtatgttaagcaactgctctacttttggtgccctccaagctgtcattgcataagtatgagcttctgaagtgtagtgatgcttgttcaaattgatgtggctcttcgcttcttctttggtcaaaaacattgtatccggccgtacaatatgaacctttctttctggaattaattctgcttcttcatcaatgtatttttgaatccactcaataggatcatcaaagtcgtcatttttcaactctgttaatgcttccttagatagctcactatcttcttttaaatcttccaaataatcatctaaaacatatgcttctgcaatatatggcaggtatacagaataccgttctgcattttcctctcgagcttcgacccattcataatcaccaactgtccagaaacgtggtgcagcttgtccgtcgttgtcttgatttttcaactcttgctgaagttcttttaaaaactgaatatcttgattcattcgtttcctcctattctgtttaaaatcacgattttatgtagactaaacctttttcttgctgtcatgcgttcacacttttgggtaagatactaatctgttaacagtaataactcatcaactttataattgtattcaccgtattcacccgagctccatttaacacctacagagccttgatttgtcacccacaatataattcccatttccccattttcatgccatcttacttgctgccctttctgataaccaagcatgtttccacccctttcttaaaaagcattttaatttaactttaatgtgtattgccttgagaaaatcccctttaattggtaaactcatacctaacttacatacgagtgggtgattccttgaataaaacaatcggtattgctggattaatcatcagcatagtagtgcaatcattttcggccgatgattcgctaacccaaaagattgctacgggtttgttatttgtatcaataattatctataattttgaacatactaaagattattctataaagtcacttgtaattttaggtgtttcctttattgtttttatgctagggatttataaaatcctctctattaccagcgattactttgaaaagcttaatgtgaattttggatacatcctcttatttgaaatagcattgattattgcattagtgtcgattgcagtaaacgtaatgaagtacattgcgaatcggttaaagaaatcacctgatggtaaagagctttgactctttgccgtttttaagctaaatacttcttcttatgtggtcttctatgtacaaaatcaaacgcaatatcgacttgtgccggttccttctcctctgctactcgctctgtaacaacgatcagttgtccattttcctggcggtcaatgctatggactgaatatcctttagcagcgtaatattcaccaataatctcatcaacgtggttgctaagcagattcctctttatcatctttataacctccacttattttatttttaccctttaaatatttatatgtattccatccgcagccatcaaatatgcttatatccgctccaagatgccacttaaaccaaactaagttaaaccaggctgtatcaattatgtatttgatgtatcctatgctaacgacatcctttcaactaatttttcaatgaattcttcttttctttatcaatatctttcttaagcatatcctcaatttcctccaatttatcaaccacttcaaatgtaaattcatcatcattggtatagcgaatctgatcacttgctttctttacaagctcaagcgcaacttgtctcggatctttatagttctcactcaaattcccacctcatttcattgaaataatccttttaaagtaattgcttagtagctaaaatctgatccgaataatgatttgcattcttcttgggtgaatggttcttcaagaaacaactcattttctttgttaaatgttatgcaaagttggttctcccttagaggaagtgggcaatcgccccgtccttcaactttaacaacgtcgcctactgcaatcgttcctcctgtaatcaattctttgaaatctaacgtgtcgtcattatgcgatccccaattaactccatctaaattcacaattttaaattcactcatgttatatccctcctcattcaggcgtatagcttatatccaattcaaaatcacatttcggatgcagcctccaaatttgatgtcctaagtatgttttcctagcgtaattcagacagttccttgtcccacttatacttccgtcataaacagctactattgcttcactgtgatcaatcatgtattcatttcgtttttgcattttagccggtgaaaactcacctggtacagctccactaactttatatttatctaattcttcaacattaataatctcatctgccacatcaagcatacgtttgtaccacattttttgttcttcagaccacactttatcttgttctttgaaaggtgttgcaattatgtttttaatatgtgggtatttcttctttagaatatgtacacaccagcaagcagcctgatcagttcctaacactccaccagttatgaaactggacttgttttccttagtgattaattcttcaattacttcaagcagcttatctttgagtttaagcattgttggatttttcatatcgtatccacccaatttgttcggcctatgaccagtgaagcacaccgttttctttcttaaagtctcctttttttgatatatccgctcacgttcatttctttcaatttccatctgcttaatatattcaggatcactaagttttttgaaagtgactatcggttctcaccctttctttaaaacagtctttttattgtgactgtataactacaattaaaaatctctttccttcttgtttacagttgaaccagccaagtcaagattaacattactttctttcatacatttgtataatttgatgtgcttcgtgctctgaaagcagaccgcccccattaaaacgcctaactatttttcgttttgctttactgagtggagacaagccatgttttttgaacaaatttgcgatatattgtttttgttttggtgtaatgaaatggggactatatactcggtcatcttgtcgtaaataagcttgtaggttagcttttaactgttcaccttgtcttactgccatatgaagatgcatattttctttatagacttctttcatatgatctacttgccttttcaaattttcattttcttcccttaattgtgattccctcatctttatttcccctcctttatatcatctgaagaacattttactttttattcagtttaataatgcttgacaaacccacttgtctaccccatcataaatttcgacttcgcagtgttgccctttttcatatttccaaattccttgatattcatcattaagtacgtcgaattctttagtttcttcatcaattaattgcgattctactagctcacacatatagctccaaactggacaacgaccgcttctaaagttttgtttctgtcataaacaactcggatatctttcactttataacagctccttttcattaaaaactcaattagatcctatttttaatcccaattaaaatgtttgggcctagcgacaaattcgtaattctcctcccaatcaaattgttttaacccatcttcttcaaattcccagcaatcaccgagtaaaggatcgtcaaattcaggaactctttttttaaatgttcgaagtttgttgaaatggctagctgttttaaatttaactttatccattggtgcaaatttcatcttcccatcaacctttctctttaaaattttacttttatcttgaattcatctggattccattaccacagtttctttttcaaaatcatttctcaacttgataatggaggttgactttagatatcctctgtcctttgtcttagcccatgcaaaaaatctattatgcaaaggagtgtaaaggcttcctgtattaaccgtatgctcatgtttgttgctgatcttatgctttaatcccctcatttgtttccaaaagttatagtaagggagcttaagttttgtcatgaagccggcatcatcttcaattacataaccctcttcctcaattgaaaagtcttgtgacacgtccagataccatctatagaaatctgtccagttactaaactctgcaacttgatttttgcactcaatggaaagactctctgcaactgccttcacttcactataagggagtttttcatacgtcatttgcctttttacgatgtctaataggactagtttgtctttactgtattcaatgatatgcggatctttttctggaagtgttacttcaaaaacgaatgaaacattatttagcttcagataatctttaatgatatttactttaaattcatcaaaggacttgaaaaacatatcttcaacccattttgcatgttcacttgttaattgagacgtaaaggatttagaagtgaataccaactgatctgacaaagagtcataccctacagttcctaaatatccattcgccttatcgaagactgttactggaaacttcattgtatccacgagatgatgcattcttgtttcagaccgttccccaatgttaaagaacttatcatagcttctgcttacaatttcattgctctcagtattaataaacaatccccttgccttaatatttgtttcatcccactttttctttctaaatgcttgctttgtaaaattaaatgaagagatattgtttggcatcttattctcttgcacatattcatgaccacgtaagtgtgaaatcaattcatcaattgttccaacagttgcactgttactctgtacttcacttgaaatttgtttaaagactttattcttcacttcatgcgtttcaattccgttctcagacagtgtaacgactctaagatgacctcctctttccacttgcccttctaagttatatgatctttctgctgctaacacaggcagacggtacatgtttctatgtccatgaatctgtacaacattttgacctgcagtattatttgcaaattcataatcaatatcgtctgaataatctccaactccattgatgaattgtgttgttgcggtcatcaagagattttcaggtacggttgaaactcctccatgagttacaatgtatgtagtgtttttatatgtaaagtaagctaactgatgaaacttcctggccaactgtctaatgtcttttttatcaatgttggattgttcgatttcaggtttagttttgttgttaaatgtggtgctaggtgtttcttcatcattcccatacatattgatatatctatcgtgatttccttccagaataatcacatttttataatctttaattttgatcatgaattctaacagctgtgcattttcaatacctctgtcgataagatctcctacaaagatgtatagttcattttcatttaaatcaccgtttaagtactcttgaagcacagtattgcagccatgaatatctccaaaaatatggatctttttataatcgtcaaaacatcttggcttataagtcatcgtgttttcgaactcatctggttttagaacagttacccaagatggcactttttctgttgtcattctttcataaatatttagaatactactctcaggaacatgtttatgttcagccctcattttatttctttttaagattctccgaacatcaacatcagaaaaatcaactacatgtacacggtatctatatttttgagctagtggcttatatcttgaaatcatactttgttttgaatgagttgcatcgacaattgtgaattcgccgcgatccatcctgtcttcaagcaatttcattaataaatcccacactttgttatcgtgtttcggagagatttcatattttccacttttgtttaacacaggtgactgaaacagtagcctaatgttgtccgcagaaagtgtgtattgctcaagtccattatctttgatccaagttgatttccccactcctgggcagcctcttaataacactaatgttctcaaattctatcaacctttctgatttttatttgtttaaaatgcatcttttaatcacttctttgcagcatagctctcaaagaattcttcaactgatcttagctaacggtttttatttggatcttctggatctctaaatcttttcgatagtaccaatgaccaattaaacatcaatggagaaaatctcgcccatttgctaaagcttaactgaagacctttccattctctccctgctaattccgctaactctagaatttgatcttcttttaaatttacttcttcttcaaacattacttgaatttcctcatatggtttatgtccaaaacaacagtggcgtgttttcaatccaatcatgaaattcaaaatatcaattaaattgatcatttgtgtatcaagttcatcatagggaatgccatttgtaatgaatttttctctttgtcctgctttcacactattccttaataacagggtagacctcttactcattccgcgccctcctcagtccaaaacaatctctcattcgttattttttccaccttataatttatgaggtagttattttttgcgtattcctctgcgtattccaatgcagttttatcatcattggcgccgaaactgagatgcttccatccgtacttaacttcgtaccacagcttatattcaacacgctttacttcagcattcactccgcgccctccaataactcaggattttgataaatgtctccgatgacttcgatttcacttagggatacgtccattctccaaaagtcttgatcgtctcccctattgaatacaaacgacccaagagaatctctaaacttgaccactgcttttataatcttgttttcgcaatagacagatttaaactttatgacgtccttctcgtaaatcattttttcgtttttatccttcaaccctgtgccccacatgagagccgcgtttctattcgtgctgtctacaacgggaaccaaaacatctgtgtataaacgtttcaaagtccaatcaccgttatttttgatggtaaggctcaacccttcatcatcccaataatgcatctgctcgccgtcccacaccctgtatgctgtgttcacaattcccgcgcctcctttgggttttcgtcacacatttcttttaacgcctccacaaactctttttcgctcatgttcagcggtgtgtaccactttataacttcgtgaaacggccggagataatttgcaagtgtatcttcagcatcttcccttccttttgttgtcccagtaaaattatttaaatagtcttcacgcgtcatatttatgtgcgttggacagtctaccactgaactaaatcggcagtaccgtccattcggttgcttagcgattaatgcacccatgttattcccccttatcttaatctctataaaacttaaattttatttttactcttaatacattcatgctgattcacaacatcacggagtatgtattgtatttcctctaaattgtctttaacaaaatctaggtctccaattgccattcttatttcgttattctctatgctgcgcaatgacctttcacatgacgctaagagctttgcatatttctttaaaaccatggttcttatttgattattagttggttcattaatcaataattaaagctatctcctttcctaattctaattcgattatataacctcaaccatatgttgtaaatacttattttatttttattctaaataattttaaaaaaatcagctttactcatactgtaaagctgctgtcttcataaacgtcttcatgccgtccagtttccaaagagtttcatttattttgtctctaaattctaaaactgaagcatgatccattctaatcctcaaacaatccccattgtttttaaagataatgtctatgtagtactctccactttgtatgttcttagaaccaacactcatggaaactgatctcataatgtctttcaagtcaatttcaagattaaaatccattgtatgctccagtctgactaaaaagtcaccaattttttatgtctcatgatgactgacaagatgtgtatgtgcttttattttattgataacagttgagaagatttatagccttcattttcaaacgaatcgtctatttcttcggcataagaggttgttatttcagcatcctctgtacacatgatgtctacatcaaatagtgcctcatatttttcttgatctttttgaagaaaccccattttccctgttttgtttcttaatttctttttaattgattgatatgcgaacaagagtgcttcctcttcattcttggcttttatcctgccaaaaaaaggaatgcacagctccccttgaataaaataatccttttctgacatacgtttccctctctctggtagtaattaaccgaacttatgttccctttttgttgacttaattataaccttttacctagttagtggcaaatcttttttctttcatttaaaaacttggaaagaattgatatagtatgataagcaatactataacaggaggttgtccgatgcttgaggttgaaatcggacaatgtttgatttccattctcctcgaaagtaaaggaatgtcattaggagaactttcaaagcgaacaggcattagtacgcaaagattaagtgactatgcaaacggctttagaccttctatgaatataaaaacagcgaaaatcattgctattgcccttaactgttcaattgaagatctctatgaatggaaaatcaaacattgactttatcgctagggagtttggcctagcgaacctccttgtaccctttttagggtatagaactattttactgcatatgtacaaatttgtctctgtctaactttgtcgaattctgaaaaatgtgaacaaaatcctgatatttttcgaaaaaatatcacgagtttatccgcacatgttttatttttactctaaaagttatgtaaagataatccctgcaacagggattaagaattagtctcaattacttcagacttgatacaatatttttctaagttatccatattcactactttcctcagtgattgtgaattaaactccgcgtcttcattcagaaacccgtattgtcgagttatttttttataatcaggtacttttaattcacccttctctttgtatatctcatacgccatgttgagctttcctgagttgataaggttcttaggtgaaaagaagggttcttctaaaaatttttgaaactggctaaaagatcggtgaactaaaaacttgtcagctttcatactctgattagaactcttgtattttagcctaaaaatgtttttgcttttaactaatgtagcaaatttgtttttaagaccactatctggcgaaccattgctaagatgataagttgtttgatcattagcacgcttaagcaactcataacatttatcgcttacagtaattattcttacaccgtgtttatcatctatcagctttaccttgttatcatcaagtaaatcgtcacctgttaaattcagtaactctgaatgctgatagccatctatgccttcataaatagcctgtatcatcgctttatcctgatcattaaccataaaatcaacatactcttctacttctttattggtgaatagtgtttttttgtttttatctataaactgctttaagtcaccatcctgtatctgatacactttgttgatgttactgtttgccaagccattttccattgcccaggttgtgtattgtccaattacagctcttgctcctcttagtgaatctatagatttgctatctaaatctaaaaataacgtacgcagctcttccaaagaaaaattaaatatgtctttttgaagtattttttctgtagctgagaaatcccttagccttagccaataatggtttcttgttgcttcactttcgtatttctctaaaaacttttccttcaattcagcattatatatttcactcatattaaattctcctttaggctttaaacaacagcaatttcatcataaaacattcgcttaagtttcttcttcataatattctttagttgattctcattattttgtcttcctaattcttcaaacactcttccgcttttactaaagtcaatcgtattaaggatattttcaagcttgtttagttctacattgttttccttcatcttcttggccaaataaacataaccgtaaaacattacgttatgattaatgtatgattgctttctaatggacgataaatcatcttcaagaaattcgtctgggaatgcataaaaaaggttatcaaaaaagtctaccaagtatttcgcaattttcaacgcatcttttcgagatttcaactcaaatacatcgtctatagcttcggataaagtataatatgttacaagaaaattgctatcaatagcaatttcactttgtgggcttattttatttttaagttcacttttaaatttcagctgctcgacaacggttgaagaataccgtttttgacccaattcttcaattctggatttttcaactgggttaattgtattcatttgagcaaagtgaaccttagccttttcttcatcgtaattgagcacatttaaaatgaatggttgatctaattcagggacttcagcaatggccttaacaatacctgaaattcgatgatatccatcaagagcatctaataaggttcctcgtgttacagtgagggtttggtcgcttgaatcatattcaacttcttcatcaccatcagatgttccaagacgagcgttaaaagttaacattgatacaattaaatcgcctttaataaacaattctttgatctcatcaactgatttagggtttgttttaggtacaggaataaggctgcccttaatgtactttccttctcgctgagtgttgtaattgtactgcaggatggagctattatataactcactcagttctttggcagtaatggaagtgacatagttatcctctttaattttaatcacatttttaaacttgtaggggagcttaactacttcttcaccggcgaatactctcccaccttcaagctcttttgccaatctggttggaaaataatttgacggatctaaagcttgcgtcccaagaattgaatacaactcttttgaaacaatgtacacttctttttcgtttaaacgctgtacgttgttatcattattatttaaaatttcttggatataaccagggagtgccttgtatttgtccgccattgtggcttttaattccttcaccatattgggatcatttttaatatcattaagatttttctctatttcagtttttaacttataaagtttatccgttgtcaacaaaacttcagacacattatcacctcacataatcatattaaatttatcattattttcataagcaagtaaagcttttatatgattatttgtatcacttgttcaaaaacattttaagtttattctgtatatacatgtctgattttaaaaagaattctttatattgctctaaggtaacatcatctaaaaaggacatgtcttctttttgatcaaccaaaacccctggatcttgagaataatccctttcattgactaaataatggtcatttaaagtattgatattgctgtggccagagaacgctgccacttttttaatatcaccattaatgctgtaagaaaagtttgttgcagtattgcgtaaactatgcggagttatctttctttctttgggaatgcccataactctacatacgcgattccacatatcctgtattgaatcaactgttaacttatgaaataaaagctcatgttccccatactcttgctttaacagcaataactcttcataaaaagcagtggaaatcccaactggtctagcctttttttgcttagtttttttaaagttgacgagatagcattggtgcttttctgaataagtaatatcatcccacccaactctaagtacctctgatttacgtccaccagtacgtgcactaaacaaaataaacatctttttcattaatctgttctgacgctcagtaacatacgctgcctcagcaaattcatcagcttcagatattccttcaaaagagcctgctgggttcttttctgttggaagaggtctaaaattaaatacagatgcatcacactcatgttcagattcaaggtacttaatcatacttttcagtgcggcaatcttattgttaattgttgaattggagttgcttttatttttagccaaatgggttcgataatcatacaggtcactcttcttaatcgccaggtcactctcagttaaatattcaatatccttggcagcatagtggttgaaaaactctcttatatgcctttcatacgtggctctagtattagacttttcaatttctccagtttctcgatccctgtttcttaaatctaattcatcaaaccacctatttatgttattgtatattgaataatcccttagtgttgacgctttcttttgagcttccataatgacacctcatatcatttttttcattaagtattgatcaaattctttccacgcaacaatccattcattctcaccttgaatattactcagcagcattatattggcgttacagatttccatttgctttaacatgtcgtattctttaagagcgttaattaagatgtctgcattcattttatcacacctaatttatttttatcctataataaaattcagtttaggacatttaccctctcgtccttacagacgtttataattggcatccccgtcaattcctcataaagctcctcttcgaacccaacccattcatcacttgtcgcttctcttcgtaggaactcattataagctactgctatctcaggctgctctagaaactttaaaacgatcatatgctttttccaaactttagccttgttttcttctgtataatatttattattcattttatttttactccttaaatacattttatagaatttttttgttctttaatgaggttgtattctttatgattttttctcattgtagttacattattaggtgtaaacacatctggatcctctaggtggagattgactcgtgtgaagttctttagttgttttatgtattgatattgtcttaatgatgtaatcttcaactcttccttttgagtggcactggttgtttccattgtttcatctcccaacaacgttcatcttgtaacttcattatatatgttgctagaataatatgcaacaatttattttatttttattcaagacaaataacacatcccctatgtatgtgttaaaatgtctgctgatttgtctttaatcttcattaggatacctttgctttatattttgatctaaccatttctgcttcattttcaagatgattatcttcctgggaaatttctaaattaatatctcccatttccatgtaccccttagccatatcctcataagaaagtacttgtccgaaatgctttttcattttaattcccccatgttcttgttttttatattatgaatttctggaacattctcttaaaattagaaaagacgcctgatccagtggatcaaacgtctagccaagttatgtattatctttgaagttaagccccgcggcttggtgatgcaacttttacaggctggtctacatggtctaccgatgctgtctcaattgattgctgtccggcaacaaatccaacagccattgctaacaagattactattccaagaataatatttttcatttaattcaccccccttcaattttagaccatgattaattcaagtagtttttcgtcacagcccattttccttagctccgctaatggaagattgataaataatttatcaccagattttttcaactttgcagtgctttcataaaaataattcttattttggtatagaatccccttaatgtaatctagaatcccagaatcatattcgtacaattccatattctcaagctcatttattactttctctgctttattaaattccttattattagtatagtaatatgctacctcaatcttatcagggatattatcagtgtcgaagtcaagccatttattatccttattccataggttgcttaaaaagcaaagagctaatcgcagcttatatttatgatgttcattatcacgagcaaattccaatcctttaagatactgctctttggctttagagtagctttcaaaaattaatgtgttcccatatgttagatgcccaaatacttttagtcgatttatatttgaattttgaataacttgttctgaataatacctagatttttcaatttcattatcatttaaataaatatttgcatttaataatgaaattctattcatatagcaatctttcacaaagccttcgggtaagtcgttgaaattgagaagtgataatgtgcttttcatcaatccaaattcgcctaccttcaaatactcatacatcagcatagcatttgagaaaaataacatttcatctgttttgcactttccggttgctcttattgcatcagttaaacttatcttactttcgctcaatcttctatgtatactgtatatattgccccattcttgacttgctaggttttttgagctagatagcctcgacactatcttgtctgttaacgtatcccattgattaatatctgagtattcaacagattgtctggcacattttttgttgggatccagtgataagaagtaatcacttagaagctgctcctcattatcaggaaacaagcttttaacaatattaattaaaccgcctaagttgtccatttctttctctggggtgttgatgaatttgtaaaaaccattaacctttttgtaccctgctatttttgagagtttcgctgcgagctggttgtctttttcacattcattcttaatcatctgcttaagattcattggttactacaccccttcccaactaatgttccctttgtttataatatacattagagttgtcagaattacaagtatttattttatttttattctaattattttttaaggaacccttatctgtttaaaattcgtattttatatgaaccggcacaataagaatccttactgtgccttaaagatatttagtcctagtttatcttttaatgcatcctgcagcacctgggaaaaattaatgttcttttcttcagccacttcatttaaccaagccggaatagttaatgttttcttaattgatttacgcctatactcatcacgaaatgcatgcataggcacatcaatcaaacacacaacttcgttttcccctgtcttaatttccgaaaacggtgagggactaggatacttctctccgtccatttccaacccgtataaatgaagacctaaagcttctttagccatgctaattgcttctgtatcattttctccacaagttatacaaccaggaaggtctgggaaggttactgtaataccatcattagcatagtgtaaaattgaggggtaagatacccaattcatttaaatcaactccttaaagaagattataaatacatttaaaaagtttgcaaattcaatacgtataattgaacgtagtatgtaaaccataaaaacaatataaagttttattcattaatttcaaaggagcaaaactttaatgcttctggtacataaagatcattaattggtctgtttattaaagaattatcgtttttcctccaaagaaatctaaactcttcttgttcagaatgcttactatctttaataaggcctggcaccaaataaaaatcagtgttttcctcattaaaagtaatgctccttgaatctctatatatgcaattattcgcagcatataaggcacaatttctttttttcattttattgtgtacccaatatgcgaaacttggaaaatcattaattaccattactgaacctccaaactttctcataatatttttatcataattgaaagttaaacaataaacataaaaatttttatttattattgaggtttgaaatgacacatcttcaagtctaactattgagtcaggaaaccattcttgtagttcattgtgaaggtgtggattatggtctcctgttttatattttttaatgtttaaatgtctgtttgctacaccttcttggtcatctccaacatccgcacctaagcttgactctggatagttattaaggtgatttacaaaaagtttcttgtccctcattaattttttcaaccatttcgcttccatgtatttataagctttctttggaaaatcttcaattggcatatatctcatcttacttctgctgtccaaaaaaatgccccctagtaacttttcaggttcttatgtctcatcagttgtatttttatttctgtcaacacttttaaagccgcttccattcaacatactcaaaccgctgctgataaaggtcttccaggattgtggcccattcaacccagccgtccacaacaatacttttcttctccccatcctcaatccattcaatccagtacacctgaacaccccatcacctagtaataacttcgatttgtctaatggcagaagtgacattaaactctgtacgcagctcgtttgctatcattaaagcttctgacattgtaatgaacttagaagcgccatgaagtcccttagatgtcttataaccacttccatctaatttaaatgacttgaagtaatcatcattttcaaattgaataacaaaaaaggtatcgataacaggcatagctaactcctcttcagcagaccagcaatttttatggccagtggcagcaatccaattaatatgtaaaacaccatgatatttattttattcttaaagaacagttcaatcatattctgctccatacctggtgaaaatgaatcaatcagttcctgcttaaactcttcatcataaacctgatcaacaaataaggccttaaatcctgtcagaaagcctacaccaagccagagcattaagaaatatgctattccaatcaaattaaaaccctccttatatacatcgtctggtattatagtagtgttaaatactttgtgtaggtgaaatttaatggaagagaaagattttgagactaatggctacgatgtaacagttgtatatgattataaggagtatcccgatgttaaatatggtcgctgtgacaactgtgattacgctttattcaagagttcagtgaaaagtggtgtgtttttacgtgagtgtcgtagatgtggtatgaagaagagcatttagtttaatgctcttttctatttcactggaatcatgtagcttacataaacttcaattccatcttcagttttatattctgcaatcctgtctggatcagtttcaatcttctctattagtcgtttcgcatccttgttcctctttgcaatattggtaactacaatccaagaccaataatcccattcagagatgcaagatttaatcttttttggtatcttatgacctcttgtataaaccttgatcatttacattctcctcacttaattataatttttacgtgctgttttacattaatgatggtattcttcggcacctgtagaagttaagataacagagtaagttgtttttccgatcattggatcattggttctttttattgcctccgaataaatctctaaaagtctttcatttgcatgataggcatgacggtttgacatttctgttgaaataaaattaacagtttcgcttataagcatgtcttcgtgatcaggggagttagaattaattttaatacttgaatcgatttctaatccaaggtaattatcatctgatgaaaaccccaacaattgtggtctttcgtctggtttaatatatccaacaaaaaatacggaaagtgggttaataccagaataatatgcttcaaaacatgattttccgtaattaaaagcttctctaaaaaataagagtggatcaatattactgttcaaaatatcgcttttttgatcaataaaatcaaaagctttttctgcaataaacattctacctgcaaaagaaattacgtacttcttattaataatttttattttcttatattcatctgattccacttttaaaattcggcccaagctatttgtagtagtcactcttttgtcagcagtcattactatgctattgtcgaatttaactgctattagcatcgtcatttgatatctaacccttcaaaaaagtattcctgactcaacctgacttacataactggttaaaagactggtttcatttcaacttaatcaatccttgaaaacagctcgttcattactctgttaggatcaataccattactatctagattcttacttagctgctccaataataggacaatctcttctcgattaaatttaaattcttccttgtctaagtctagtaacagttctaatgacttcataactttaacaatttggactggtgaaagatttagttcgacttcctgttccctgtcgattgcaactggaacagataataaagaagaagggacttttaagattctgcttccgaaaagaattctaaccatttgaccgttcaattcgtaatacttgtcttctagtcttccttgagaacctttttttcttatcaaggaagctttttctgacgacccattatagtaattatcatgcagcagaactgcagtaccggcagtcaagctttgtttttcttcttcagaaagttcgcttattttaacccattctttatctctagccaattaaaacccaccttaattatatttttcaatgattcttgaagcagcgtcattaaaagctgtttctggacactcagaattaaaaatatttaacaacttttcttcagtgaattcccttttcatatccgcgatcatttggttttcacagtcataagaattaaaacttaaatgggctaaatcactgagcgaagatgattctccttctgggattggccattcgatttgctggggatcatacatataaaaaccaccgatgtatttaaagctttgggatttatccatcctttgaattgtcgagtcgtctaaattcagctctgatatgaatctatacattatgtactctcctttattaattaagatgaaagaatgattttattcattaacaccattttcatattcaaggttgtatgttgctatttcgtgtactcctatatcccctgcaaagtttccatcctcatattcctgttgcaaataaaccgctttatctttttcgaagatttctcttgcttcaactaattcagttacagcttgtgaccctagtcgatctgttacagtaaaaactaagcaccgttttaactcggtaccgtctttaaggactacgtctgctatgacgtacccatttggctttagttcgccaatttcattgcgtcttttatcaattgcctcttgaagaaccacagaaacagtattgttatcggacttacttaaagccatttctaattcttcaatttcttcaagtaacacttgaatttcctctctcattttatctctccctttgttgtaaagtgcaaatttatgctactcctcaaagtgtctcgcaattattccactttcaacaagattacttttttatttccaaactctgtcaattcaatatttttttgaagaccctgatccaataagaagtgatacattttttctgtttgattatcctttttttcgtttggcattccccggaaagtcatattaccgcatgtataatagaggcagtaaccgtcgtcaaacatcttctcaaaagtgaaacccgctgaaatattgcttagtccttttactctgcttttagagctctcagattttttaaagctaccttttaataaaattcgctgaacttttgcttttaaagaagttggcaacatttcttttcctcttttccctatgaaagtacgattttatgtagacctataaaatttgtaagtatttactgttcttgtaactttagtataccatgatcactttaagtgatcaatatctttttaatcttttttgtaaatcaacagctcatgcagctcaatgtctaaatatgtacagactttatccaacagatcccttgggtaccgctccatttcatcatgatacagcttcctgactgtgttaaaaccatgatcaatatcattggacagctttcgaatactgatattcctttcgtctaatattggctttaaatttgatttaatcaatgttactacctcgcattcattatgtatgatcactttaaattatcattatatccataaaaaaggtcaaggatataccttgactatgtatcaagcttaccaatcaaatgaatcttcatgttcaaatccataaatacctttaatccacacatctccgcagcctggattctttgtaatctctaacacatgattacgattagcatctccctctactcgatctgtagcagtatagtcagcatagttccctacaaactgcttctcactacgtggaaatacccagccagcaagagttatcctactgattttcatatttagagtacacccttcagcattgttaattgtgaatttgtagaagagccaagtgcgatcaaaattccgatcaaaataatctgccattgaaaaactctctgaatcctcactcatgtgaaaatccacatttttgtagtctaatgtaagcttcgcctcagcacttggtgtgttaaaactcaatataaaaccaatgcaaatcacagccaaaaagattagctttttcattccctctcccccttttccaaattatactatattggaaataaaggtgaaagaacaggcagaggcttcttaatttatctgcattctccttgatatagctagatatacatgtatctatgaatatctacgtgtatttataagtatctatacctccctacatcacacaaatataccttattaagaacaaaaatatttattttagttcatttttaagaacaaatcttccatttttatgatataatcatcactgcttataggcagccttactgcttattcgccatatggtataggaaagaggttcttttaatgaacgtaaaacattctaactgtttctttgttatcaggctgtttgctgctctttgtgtgttgattggtcatgctacaagagatctaaatatttctgtctttggttataccccagagagcaaagcaatatttcacaccggcatatcaatcttcttttttctaagtgcattttttctttttacttcttatgagagatctcagcttaaaggtaataatgtaaccgatttttattggagccgaattattaggatcgcacccgctatatacacctatgctatcgtctccaccatcctgttaattgttctaggagctctttcattaacagtattcactactaaagagtactggacatggcttcttagcaattttgtgttataccctcaatacttccctgacatattccatcacatcggcacaggtcgccttaacgattcactttggacaattcctgttcagattagcttttacctggtgttacccgcaatttattggttttataaacgtttcggattcccaaaaatgattctttgctcttttgctgtttccgctttcagtgtgttagtctctttcataattttaaagttcgcgcctggcagtgtgttcggtaacctgtacttacattctttcctgccgcagatgttttatttcactttgggcatcttctgggctaaggcatggagcaagttaccgcagcatatcgttttatttttgtcttcggtaattttatttttattctataaacttgaccttctgcatctcagttcaataaacagcaccttatggagctttttatggttcgtacctctgagctatgcactcgtctggtttggttacaatgggccgaagatattgcgacagctgaaccggttagacgatataagtatggggattttcatatggcacatggtgatcatcaacatcttcttatacactggaattaataaaacattgtctgattacccgctgatcatagccctaattgctgttactgctgcatccgcatttctttcgtacagaatagtggaaaaacccgctcttaaattacgtaatatcaagaaaaacaaaccagtcaaaacaaggattgcgagctaactgcaagggctgttcttatgtaggcagcccgattcccgttttaaaataaagtagtgtttttgttcaccaattccattctccattaggctctcctgttggcttatacataagctcaatatcaacaaatgttttatgattacccttaggaaatctaaccaggacaatctcacccttttcaggaacaaactttacatcgttcctccaaaatttgattgttttatctccttccttagtaattggtgttgtatgataaccatatttttcggcttgagtgctagagatcacgttgcctccataaacatattcacgttgtccattacgtgattgaatttccctagtttttaaatcatatgcgtaaatgtcatattccttattctcttctttgtttaaatatttgtcattaagtgcttcactttcttggcttgaatcattgtcataataactttttctttcattttcatcatcgtgatttacctctaattgagtatccacataaacttttgtattgttgttaaatttactacactgaactataagaaataccccgataatacccaaacataaaattattaactttttcatcacttctcctttagtttcttcgtcatccctcatgctgttgtacatattttaaagtaacttaaatgatttttttatcgatgcaatacatatcgaatccttgttttataattcttgcctttccattagctgtagaccaactttcacttaaattttcaataaaagaaaaaagtttgtgctctaattttccgggcgtaaccttcataacattgcgaaagattttcctatagcgaaaactttcttcaaactcaatcataaattcatttaattccttattccatgtatccaacttttgatcattgagactgtaggaagatcggttaaatgagtaaggcggatctatagaatagagtgctactggcatacctttgtaaaggatttctgaatagtattggctttttttaactccccagctaaggtcattctccttaaaatacctattaatctgtgattctaattctttaaatcttaagtatgatttatataaggaaggattctttcttgctctagttacctgagcataaattgttggagcttctgttatcttggcccaaattgtacggtgtgttccatcaccgtaaacagcataaaagtcatcatcttcataatgaaccaatttcactggtgagtgttgataataagtgtgaaattcttctagactttgtttttttaagtattcaaaagctttttcacatcggccaatgtcaatattatctgtaccgttataacacgcgtgatcaaaccaagacacaccactggttcccctgaatcctaaactcttaattttttttaacgggacatcccgatatagtttttcgctgtttccgacttcatcataatacaattcatatggatactcacttatatttttggtgtccttcatttccttaatatgaaattcacatacacccttttcaagaagcaatttttcaagtttatttttcaaatttctccccccaatgacgtctcaatatcattgacaactcatgccaataggtggattttacattttttctttgcgatgataaagaagcgtttcgaattaaatggtgtttttatttagacaggcattcctcttaataaaatatttatcttattatcttctattttcaactaaggttgcgatacttactttataatctactgacgaagcattcttgtggtttgcaacgtcgtcaatgtcagcaaacatacctccgcaactcaagtcattaatcaactcgatattaaccaacggatcacggaatgccttgattctatttttatacttataaacttcgttaacaccattttctgcccacatcactaagagcaataattctaattcacgcatataattcccctttcctattaaactgctgttttattcagatttattatagagtttataatcaccttcgccatcctcatgatgtacgtctttcgattcgcattttttacaaatataactacctttattgaagatattgtctatacctgaatctgaatagtctacatcataaatctttccgttcctagctccacctgttgtatcaataagctgtttggctcccaccgatacctctaggtagaaaaaacgttcattaccacaatcattacatttagccattactccgcatcctcctctgcatataaatcataataattttgtttaattaagtatctacttttccccataagatgactttcgctacaaacagtttcttttgttttcttgtcaagaacagccgtaaaccctgccctctgttttgtttttaggactctgctattggtatactttaaataccattttctaaataaatcatattcttctattgacacttctttcattactgccattacttcatcatctcctgtataaaattgttgttttatccacttctttgataatgtttgtttatatctttaagtacaatagctttaattttattttcatgctctttgtctacaaaaatccttatcacattatcacagtctatgtgttctaaatgctcaagctcttgctgtgtatcaatataaataatatcccctatacgtttattcccgtatttatcaaagaaatatttaactccctcgtcatattccctgtcccatctttccatcctaatttgatcaattggtgaattagaggtttcattcgtaaagtcagattgatcttcctcatttattttagttgcactcactttcatttgaactcgttcgttaatttcttgagaagtatcttctataataagatattgattaataataaaatctagtgcgttaattattttatttagataaactttttttacaggcttcttaaattgattgtaagtcaaaggtacttcaatgtaaccacgggcaagtgtatcgtactccgcaaaactatttgaattatcatcacgctgaattaccttatattcaatgcaaaggctattagtattacggtaaaggctggtttgaagcgttgtattgttatctaaattatataggtcgcatgttgtttccatacttcctctgaattgattgaaatctacttgatatgtactcatcttaatgtctccattctgtttaaaatatgcattttattttatttttacccttaaaatatgtatgctttcgctgttgttttaacttgatttaagtatatcatgactattttaaataatcaatacttattttatttttattcttaaagtgtgtattttgttatgatgtaagcaagagaagcttcgatgtatccagtatataataagaagcgttatttaccgtatcactgtaagattgtgccccctcaaaatcatttattacgtctttttcttctgccgtcatatcctgatattttaccttgccatacgaaggaggaagccagtttttcttttggctgccaaaaatattgaacttcttaagcatttccttgtctttaaactcaatgtgacatgtcccttttttatagaaagttacatagaagtactttaattctatttttttcgtttcaccgtaatgcttagccagttttagagattcatctatgtttatgtcttctgttaacccgttgtcaaggtaattgaaaactttttcgatatctttcaacttttctaagaccttgtagtctgttggactatagtgaccgagccaactacaatacccgtttagtggaataattatttttttattaattttatatgatttatttgttttccacccattatataagtgcacattttttgatgattcatcatagtaatgcttgtggctaaattcttcaaaaaggttaagtattgtatcttccacgccctgcgtcatctctttgctcatctgaattctcaatgtatagatattgaacaaagaaaagtcataatcttttaattcctcaacgtgctccaaatacttttgtttcagattgcttgtgaagagccccataaattgatcattgttaaataacgtattccaatacttcgccctaatttgttttatatatgcattctctatgtcattttcttcggtattcttatcaattagcagcttcaatattggagtactgtcatcattgaaactatgcagcattaagggtttcaaactgttgtattcattgattaattttaaacccgctttgatttcatagttgaattgttctacaattccttttataaagtccaccaactgtgttgctttataatcctcattaattctatgtgactcatcttttttcaattcttctattagaacgctgctatattcttgtttttcaatgcttatgtaaattattgctgtttcaacttctgtgtttcgctctgagttcgaaaaagcgttttgaatgtattcaacttctgcatttatttcctctagcttacgtataagaaatttcctgtcatttgaatacggattttttaatgtttcggcatttagtaagcaaacaatttggccggatctttgttgcttttcaattaattcaatcgcctttaataaatgtttaacaccgctgctaaaaggtggattcataaaaatcaaatcatacttcttgtaagtgttaaacgtcagaaaatcgtctgctatcactctataacttttcccctcaaggatgtgccttaagttttcatcttgttcaattgaatcaatatcatatttcgaattccctctatagttcttggtgtatttgaattgattgtgaatagcttctaccaaatcccctttacctgctgacggctctaaaacagacttaatatgcttccattctatttttgatgtcatttttcggattaactgtggtggtgtcggataaaaatccggattatctttaaacattttttgttctccctttttagggaatgagatgttttctcatcccctcttattttatagactaggtttatatgtgttgattagaggtttgaagcttttattatttaagtaatttagaacctcgtcaaattgtcttttgtcacacgagtagtacttactgtgaattattttagtcccatctggtttaacctctacattattcaacacagtttcgggcagcgagtgccaccctttgaacatcaataattctgaatagaagtgtcggtaatataaatttcttttattttcaggcttgtatgtcaacttcactgcattatcatattgagcatatttagttgactggcaactgtcatacgttattttttcagtaattaaagatccaagatcagatatgtaaaacagagtatatttttcacctttttcaagatcagcatttttaaattgttcttgaatgctgtcaacttcatggagaattctgtataaagaaattttcaattcctctgtatctgcttgttggataatttttttactcaaatttaaattattcaatttcaatttttctttgagtaaagctttatatttgtcccagtcttcattattccaggttgcaaatatatttaattcttcaatgactgagctagaaagatcttctatttttcccgcttgatattttaactcgtctaattctccttcttttatcgcttgtttatcaaaaattgacttttcaatttttgcattgtccactaaaccaacgtatcttgcataagaatggccttgagcgtctacaataaattgcaatttcccgccgtagtacactcctacgccatataaattccatttaactgtgttcttttctaaatcgtccatattgtaataatcaatcattgagttgatcctgttgtcttccgtaaaacttccaccggtttccgcaagaaaatcaaaatcatttaaaagcaagttagaaaagttgtttaaagcttcttcagtattgaaatgcacttcttttgtaattttcacattttcaagtctgtagtcacctttagcaacctcgtctttatattgatcaagtgcttgatttttgtttaagttggcaaactgtgcatcaataacaaaatactcttgatcttcattcagttgttttactacaatgctgctatagatattttcggcttgtttcttttcttcttgccgtctcttatattcagcatttttgatttcttgttcttttaaatattcctgaaattctttttcttttctcgctttctcggcttcttcgaattcttccatctttgaatcaaacagtgtcatatcttctttaatttcttctgtttgctctgtcactgtgtattcccaatctaatgaaacacgaccatagaaattgtagcttccagcatagtcagtgtaaggatctgctgggctgtagcaatggcgataattgtttaaaagactgttgcaataatcataaatcgcagtcaaataagctgagcctttttcataaggacttgatttgattgtgatgttaatagtgctatgtgaatagctacccccagtagtaacagagaatttgcattgtgggagacgttgtcttaaatgctttcttatttcctttgccatttcttttacttcttgttccttatttacttctaattcactccattgtgttgcatcccacagactcatatttacaccattagctttctttttggtttttgtgattgttttagaagatgagacttcttgtttagtaacaccattagcgacctgcattgatttttctgtccgtttgctccaccaacattttttgaatccagagtatcgaaaaccgtttgatttaagatgagttaaaacctcttgttctggtttactatcaaaatatagttcaattccatttaactcttcattaattcttaaaacagctgtcattttcaacctctccattctttataactattttatttttatcttaaatgtatgtaatcctttgacttgatttaattttaacatgatcacttaaaataatcaatagatattttatttttattctaaataaagaaaatcctattatcgaggttcagcttgctgaaacgagacggccgtaaaggcactttacggacgaatttattattttttatttaattatttttctggttctccttaagacttaggctctaaaaccgttgatatgactggcttattttttaagtttaagaggtttgtcctctttatcaggtatcgagccagtttgtgagcagcttcctcattcttagagaaggtatgtacaaagttatttcttctccatccctaatagctgacctccatacccattgcactaactcagacaatgcaaatgcgtcctggtctattgtaatactgtacttttctttaaaataattatacagaacagtattcgtatatctgtttattgtatatgctaagtgtttcttatgcttaaactcgtttgtagcacgtgcattacatgagacaaacccctttgtatacccattgccctttattctgttcttatggtctgaataagtcgtccacatagcttcatcacttgacgacttaacaatattattaaagtaattgaatacattgttcttcacctttttgatggtgtaaggtgatttatttttataccaattagaagacagtgaaaactccagttgtcctattgtgtttagatttccttcatatatttttattttgtttcttaactcttttttaaagctcctttcataatcaggacggtgatcaatgaagctatactgtccatccatgtaagctgaactgtacttttgatacttaatgttgttcagatcgtagtaatatttttgtatttgagcatcaaacatatatgtaagtatgtaaacttccttgaataactggaatacatcggctggaaagttccaaatcaatatattgtctttgaaatacattagattgttatttaacgccatatctcgaatgtcatcgtatcgtgtttcatagtcttttttttcttcattccatttgacaaaaccgttttcaatataaatcagattggaatcaaacagtgttgttagatcatgtttctttacctgtaattgttccactacttccatgacttcatctaatatcagtgtgtaattgcctgcaagtataagttcctttgtctcgtcgtttgcgtttttaaaaaggttatgagttgccacaatgtttttattttgtgataagagttcgtgaaaggattcaaacttatattgtgttttatcacctttcttctttactttaggttcgaaaaattgtttggactttatgcttttctttatgcgctcaacttcatttaaataaggtgtgatgaatataaaggtttcttctttaccagcagaattcattttgttaatcgctgcagatgttttaccgctccccataaccgaatcaattattttaattttattcataataagtgtagacttccccctttaatattaaaaataaaggaacggataaatgttttaccgctccttctcatgtatgaaattcaattgttgattctttcttcaagatcatgaatacgtctttcaagaccagagaatttcttatcattgtatcggtggtcactttctacattcgcggaaagatactgtataccctcaaggattcgtttcctatcccgctcacctctaataagcatcggctagagttttaaaatggatatttaaaagagtagtgagttaaggtgttcagctacttctgcctcttcccccttaaatacaattttttctctatcaatgatttctaattctgacatgttcacacgtctaactttatatccctcaattgtctcttcctcttctatttcaaaaattctatcttctgtaatcatattcttatcctcctatatacattgtatttttcctcttaacttgtaactttattatatcatgatcactttaaatgatcaatatctttttgatctttttttgtaaatcaatatccagaaaaccacaaactttatttatttaacctcttacgtaaagtaaaataaatgatccatgacaaaatgacaatgatacacgttactatgaagatagccgtaatcagcgactgtattccgctgctgaaataatctttgatgaacagaaacaacaagaataaaacaacaaatgttatgttcgtaaaccataatgagaatcgtttcatgtttacaatgtgcttgtccatgttataatatgggtagtgactaaaggggattaattcccctttagcgtgttatctgcgtatacgtttgcgttgtctcttgctacggaggcgcttgcgtgtacgctttttgcttttcttattcttcatcaggttttgaatcttctcagctatcgttaaacagttgatgattaaaaccgtgataggaataaggaaagcaattgttatacccactttctcaagcactatgtacacctcctttcctataactctattatagcacatttccctttcaaagtcattttatttttactcttaaaatggatttttttaaattattttggcactattattcatggctatttataggctgtataaggcgtgtatgtggattggataccaatgatactatgattaaattaaaattgattctaggtggattagaatgcttctgatgatgtgtgcttagtgtgtataggatggatatatgatgtatggtgaaggaaacggatagagatgattaggtaagctgaggatagtttatggtggatgcaatgtaatgaggatgggaaaagatgaacattaaggatgaatataaaataggtgtgtagttagatgaggaattgtatagataacacttcgatttgtttcctttcgttatatacacgattattttaatgaatgggtattcacttttaagttgaccgcttaattattttttcaaaaatatatattgtttttcatttgaaattgtgttagctgtgcaaatttatcacctaaatcataaaaaccctacataacgtatcttatatagggaattaaataccaatatatagggggtatattaacatctaaaggccaaaaaataggaacaaatgtacccctagcacttccatttccacaccaaacttattttttcactttcccatttttcagcctattttcacatcgtaatcgctatcgtaaaagcctataatatcaatgtttttccaccccttattctcccctttttcatcagatttttaaataaacaaccacttttcctctctcctgtctacgttttacgatcacaaaacacctattatcccctttgacagccctaaaacattgctatatcaactaaataaccctttctgatcttcatttacgataagcacttttatagctaacgatcacccgggggtcattaaaaatcaaaataaaaaagccaccataataggcagcttccctttaaaattaacgttttagtctcttcagtgcctccatatacgaggtctttttcgattccttgttctccagcttcctcggcttgaataaatcctctctacggcgattcttcgctttatagacagttgtttctttaacttcagtgtttccactttcaattagatcatctaactgcttcatccgctcattgatccaggttaatccactaaggatggttattgccctattccctttatcataatgtcctttaaataagtctaggggcatcttgttatcaaagacattaaacagctcattatacgatatatgctccgttaaaaactcatgaacatccagaatgacaccagctctcatcacatttgtaaactcaacaggagtaaatatcgaattgttccacgacttctgtatatcttcatgcagcttatcaaaatacttaccctcaattgtaaattcattgaggtctgtttgagcaatagtcatgattcctggtgtgtcaaaaagctgatttaaatccttcctgtctaatgtactgatctttgatcctctgtccgtgtaattgagtaagacttcgattaaatcaaggaacatcttgtttgtctccttgtatagtctgctttcagaaatcttcccttcatatttgctcaaaaccatttgattatccaaaggtaagacacaggtctctggcatagataagtcatcaagtaactccagtgtattcatctggttaaccaatacctcattattgtcaggaaggattggtacagcaactattgttttatgtgtaagacattcgtttaacaattctaataatataggggctactcctgaaccggttccaccagctgcagagaaaactacgaaaataacttgtactgaaggcttttccattgtgttctttatgaactcaatagaggactcccagttatttttcatatgtttcgctgctacgcttctgtctttacctactccttctgtccctaccagatgaagcttatcttgaatattgattaatgaattaaggtctgaaagtgaataatttattgcaacagaatgaaatcctctcttcattgcttcatccgctatacttccaccggcctgaccaactccaataaatccaaacattaaaccctctccctttttaattgatatctcaaagcttcttgaccatattgagtaataaaaattgtatgctctttactgtttttcactataataataaactgcaaggcctcaagacgatcaatgctctttctaaaagtagcatcagttagttgagttttagcttgaatggttttcttcctaattgatttaaactttaaatcagccccttcatcgctcaataagcctagaatatacagatcatttcgagttaagttgtcaatgacagaagcaaaataagtatccatgtgacccctccttaatatctgatgattctgaagtatcttggttgatatacgattattatattgtctatttgcatttaaatgcaaatatttttgtatcttaatgcaaataatcatactctgcttgtatgtaaaccagtcattttataaaatttattcaaacagcaaaaggatgatttaaatggaatatagggttaaaagtaagttggattcatttctaaacagcaaaggtattgaaaaaggctggttagcagagcaaataaaagctgaaagagcaagtatatctagatggtgtaaaaatgacagcgagggatttgcaaccgtcctccctagtacatacaatcttttattgatggcacatattctaaattgtaaagttgacgatctttttgaattaatcgaaattaaatccaattaactttggatttttatgtttacaagagtaaaaataaaatatataataaagacacaaccacatgaagtggtctttattttaatcattttaagagtaaaaataaaatagtatggaggtgtaagatgaaaaagcagtatttatttagtcatttaatggggtttattgagggaaaagtagtcgatggtacagcaacacccgaagaagaatacctttatcaggattacaaatggtacggaaagattaataagcaaagctttacatatcgaagtttagtaaatcaatatcttaatagcgaatattaagcacatttaaagtaaaaataaaatagtaaggagaggattgattgaaaagaaaaaaagacggattgtctaagcaagttcacatatacagcgtggacacatcagcattttataatgacaaagaaaattcattacataataagattttgaagtcttatagatacagagattatcttaagacattagacaatgtaaataataaacataagaaatacatttcacaaagaattacataccttaaagaatgcctctattctgcattcgaagaacataatgacataagaacacttcgaactgacagcttaagggacaataaagtgatttctttatttgattcagtgttgacccgaacattagggattaaagaaaacaccctttcagaggaaatcatggttgtccagacttaccattttgaagtattgaaggacattattgatcagggatttttacataacaatgaaaaatacgtttatttcacgagcagtgccggtcaaattcgtacaaagaagtcatgtttcattaaaaaaagcacctacgataagtatcaggatgctttgacatgcggcttgagtattgaaaagattaactcccttggtggtagcagcattaacaaatggaatagctatatggccttatctaacagtgccagtagcccttgggagattgatattgataaagccattgttgtcgacgacttagaaactgatgtgtcgagtctcgttgactatattgatcgagatacctacgagatcacacgaaaaacaatgaacattcccattgagcatacggatggctgcggaatgattctccccactctgagtagcaaaagcttcatggtcagactcccatgggtaaagggtttattagtcccgtttgattttcgcaaatttgctgaggaaaacaaagcttttaaagtaactgatatatacggcaaggaatgggacgtagtgaaagatgatgttcaaattatcttcactaaaagccagtttaaaatgtggaagtattattcatcgtgggaagaatatcaaggcaattataaaaaatatggatgcttaggggcaaaactcaacgaagaagatccttctgttgaagggaagctcacttatcaaatgctccaaacacttacagatatctccggtgaagaattaattcaaatgagctcaaagactgtaaaagagattaccacattgggaactgacaaagaaaccatgttaagagttcttggagctacggagaaaaagaaacatcggacagctcttcaggacgctttacttctatatccagaacttcttaacgatgatcacacgaaagaaattattaaaaataaaaagaaaagcatgattaaagatgccaaatcaggaaaattgcttgttgatggtgctcgttatacatacttatgccctgatctatatgctttctgcgaaaaattatttctgaatatccagaatccaaaaggactgctttcaggaaatgatgtccattgttctttatatgatgaagggtatattgacatcctccgctcccctcacctattcagagagcatggtgttaggtggaacaaaaaagatgagaaatatgaaaagtggttcattaccccaggtgtttacacaagcattcatgatccgatatctaagttgctgcagtttgataatgacggggataaggccttaattatttctgatgagttaatcgtcaatattgccaagcgtaatatggaaaacatcgttccgttgtattatgaaatgtctgtagcccagaaacaaaagattaatagcaggaacatctatgaagcactaactcttgcttatgggatcaatatcggggagtacagcaacaacatcactaagatatggaacagcgacaatataaatctggatgtgatcaaatggttatgcatggaaaataactttactattgattttgcaaaaaccttattcatgccgacccgtcctgatcatgttgatgaaaaaattaaagattacataaaaaataaagtgcctcacttctttatcaatgcaaaggataaagaagaacatagtgttgagttaattaatgaaagcacagtaaataagttagactccattatcccttctgaccgaattaatttcgcagcagtggcaggaaaatttgattaccgcttcctgctcaagaacagggatattaaattggacgatgcaattattcgtgaatataaacgattagaccagaacaagaaatggctcatgaatgatgaagacattaagcctgggcaaaaactttatgtttataaggtcattaaagacagattgctgaaaatctataatgacgagcaatctgttgctgatgttttggttaagcatttatataaaaagaaaagcaaatttaaatcaacattatgggagtgctttggcgatctaatattggaaaacatgcagaataatttaaaaagatttaaatcttgttatagttgtggaaagatgtttaagtcaatctcaaataaatcaaaatattgtaataaatgtgcattggaaattgaaaaaaagaaccatcgattaaggcaaaaaaaatacagtaagaaaaaaatgacgaaatagaaagtgtattgagccttactcccccaaggggtacagcgattttaccggaaaaagtttaacgaaaaaatccccttgaacccttgatataactggtctgaaagccctttttgagataatcgccataagggagaaagaaagctaatttccacatataagggtgagtacgtctcccattttttcaaaagaagcacaaacgataccgtaattatactttaacacaaaaataaacaaaatcactaggaggaattaaaacatgaacaaaacagaatttgttggagaagttgcagaaaaattaggagttactaagaaagaagctgcacctaaagtggaagcagtatttaatgtcatcattgaagcactaacaaaaggtgaatcaatcaagattccaggagttggaacgtttgaagttcgtgaacgtgcagctcgtaaagggagaaatccgcaatcgggtgaggaaattgatattccagctacaaaggcacctgccttcaaggctgctaaagctctaaaagacgcagtgaaagcttaataaaatttactgaggacgacaggaaaggcttcctgcacgcctttgtcacatagagcttatgctcctaaaagtggcagagttagaagttatggaggaaattgtcgacctcccctcttttttcatgtattcatctccaggtttattaattagagttcttttattgatggcatgggggtgtcgtcaataataagctgtttactgatatgtgggatatcagttctccgctaatattcatttgtttgaggtcttggatgccagggttttggataagtggatattagcggggtattgccccatcgtggattaagctttttctaaacattgctattctcactttcatacgaacaaaagcattaaattcgactttacagctacaactggtcattgtagttagtcggataatggtcacttatgagggttcgaggttaactcgcatgtctgtatctaaaaagagacaggtaaatggctattatcgggctaaaaatgtcggtaagacttaacgcattattgcaaattgcgactgaatcccatcagggtcttattatgggtggcatatagcctgaatattaattgcggtgtattgcttcggcttgcacttaggtaaggtagatgcgtctcccttccctttaaataatgcccttgtaagctttgatgcttattatgcggtcacataaaaatttttccgggttagcgaggctttttgtaattacatcccctcgcaaaataagtgagatggtttttgggcgattgatcaccgctcccatttcacagaaaaggattattttcggtcttgccttttcaatttcacttagcaacacgttcactttatttcacttcatctccttcaatgttctgtatggagacttacctttcccatgcacatacctccttacacgggtcagagaaaactgtgcaaaataaatggcgagcgtttgagacgctttgtttctcaataaggcgtgtaacccgacaagagcatttaaaatgccattgagaaggcttattagggtcttccttctcaaattatttttcccttggctctcagactctactgagcagttggcaagcaacataaaaacttgatatataagatgtaaaggtaataggaattttaacacgtcccttaaagcgtgtatttttgttatcatagctcatctgccaggtgtagaaggagccagctggatttcgcacagcgataaccagccttttatgctcatgtaccatgatgtacaaggagtttctgaagacgttatttggcgtcttttgttattttcgacttacaaagatttcgaacgatgaacccgtaatcagcgtattccctgtcgattttgcgtacctacgtgagttaatgaatattatgtaaaaaaacgctaatttcgtatatttttcaagggaggacgaaaatgccgatacgtattaaattcgacaaagacgcttacttaaaacgtcatagagaattccgggaaaaattagacgagtttaagagcggcgattatgaggaagcgtataatcaagcgcaggtaatcttagaatcgagtgtcttaaaacctaacgatgcggtggcggaataggtagacgcttagacgaacataaggacgatgctgtgaggtagacaacgggctacttaatagtcggtttggctaacggttgttgaaattcgtccatgcgaggtgcaaatcctcgtccgcataataaacgaatagccaaggcggcgtgtcaagctatcgcagcttgctaaaagccaacagcgccaactatacatccggcattgtccggcagagaagcgagcgagtaagggatgcgtcctgatctcggtgtatagacgcaatcagaacgaggcttccgcaccctacggcggaggtctttttgtgcttgcgttttactttactgatcagccggaatgtccttacgagacttctggtacgcaagttttcaataatctccttcgggcgtttccccaacgcctatccgactcatattttcatctccttatatccccttttcggacgttaccgatgtttcggatcatcgggcttccgaaggagcttattgtacgtaaataaaacaaatattggaggaatttaatttggctaagaaagttcatacagtaaatttaaaaggtaactatacttacattgatgggattattgaagaagaaacaaaaacagacatcgagcgttatgatctgaattctattttaaaatcatttgacggtcggaaagtgaaaatttctattaccgaagaagacgaacttccacaaatcaatgagtaggtggtgactgaatgacagctattttagatactgttttacaacgagaaaaagacgaatcatttactgattatcatatcagacttttcaaaaacaaagacacttatcacattgacacaaaaacaattgctgcccttttaaacaaggatcagggaaccaactatgatgaaagcaaatggcgtaaagactttaaacaatttgagcgctggcacgattactttatctcaaagaatatgaacaaagaagttcaacaaaaacatgaagaaattcgcattgaatccgaaaaacaaacaatcaaagcacgagatcaaaaaagagaatatcggaaattcattgccaatcaagcacggtttgaacaaattaaagatgatgtcgtacaagctattgcatctttagagtcaaaaagaccccttcgcttcaccttcccatcacctgctattgctgaaaaacatggactcgctctattcagtgattggcacttcggaatggaaatcgacaaccgcataaataaattcaataaagaaatctttaatgaacgtgtagaacatctcaccaacaaagtgattgagtatggtaagcagaatcatgtttccacactgcatgtagcaaatctcggtgatttaatcggaggtcttattcatgtgtctacaagagttcaggccaatgaagatgctgtagaacaaattaaatatgtatcagaaacgcttgccgaggttttagcgatgttggcaagtgagtttcaagaggttaagttctacaacgtggcaggtaatcacggtcgcctctccccttctaaaaatgatgtagggattaaagaaaactttgaatacctcattaattggtatcttgaagccagattaaagaacatagagaacatctccattgaacctgagcaagacggattcatccccgctaaaatcaacaatcaggaagtcgtgtttgtgcacggacactacgatcgtgttgatcagtgtgtaacacgattacctcaattacttggctacatcccttcttacatattcggtggtcatattcatcacaattatgaaaaagagtacggcagcacaaccgttgtagtaaacggagcgcttgttggtgcggatgattatgctatgcaaggtcggtttggcacaaaaccttctcaaaaatttatggtttttgatgatgcaggtattgaggctacatacataattcgctttaaaaatgaaaagtaaaaggaatgatcctatgtctgcaaacgattttatagaaatattagcagtgcagtgggacaacctgtcccctgaaagtaagagcactctagtaaatttgattgttaattaatataaaactttaattttataaagatgaggatgaggaagattgaaagaagaaactaaaattctttgggaatatgtaaagctgctaaaagaaattaatgatagtggttatctgtgtaacagggaattaaaagacgccctgacaagtctgcataaaagcctgggatttgagaaaaacactaaaagtgaacaattgaaccgagacgtcaaattctctactaaacccttaaacggaactagctacacattgagcacgggctacaatcctgaaagaattgctgtaattaatcctagaagagaagaaacaacctttttaattattgatttaaataattcccgtattgaggacatctctaagaaagtggagcatggaacgtttaaacatcaggctagtcaaataaaagccattattatagacaaacgaccgagtaagttaataattgatgcaaacggtattggaaaaggtttgctggatgctcttgctgataccttaaaaggaaccaaggttgttttgtccgaaaacggtgccttaacttataaataaaatacttttttagaacgtccagtgatgatttgagaaatctcgactccctctctattgctgggcgttttataaaacgtgtttttgaaccaaaattttggaggtgaaccaatgccaagaaaagctaaagaaaaggaaaaattgatctgtgctgcttgtcaaaaagaaaaggacaaagagtcggggttctataattcacgaagtagtctgtatgagaaaacaggaaaagtccctatttgcaagacttgcttgaagaaaaacattgattacagcaatattgagtcaatatatacagtcttacagcagatcgatgttaaatttgatccgttgtattgggaacaagctgaaaagagaaaaacagatacatttagtgcttatatgacaatggctaattcattgaagcagtttaacggtactggttataaagacagtgtttttgaaagacaaccagagaagccacttatagaggaatctacgcctacaaacaattctggtgttagccaatctgaaattccagatgacctgattgataaatggggtattggttacacccccgatgagtaccgtcagtttgaaagaaaatacaataaacttattcgaaattacggagaaaaaaccacacttcatactgaaggcttgctttcatatattcgtttccgtgtaaaagaggaattagcaactgctaaaggtgatgtaaaagaagctaaagaatggggttcattagcttcaaaggcagctacagatgcaaaaattaatgtatctcagttaagtaagagcgatatcagtggtggagtcgatgtactttctcaattatttgaagccgttgaaacagaattgggcattatcccccttcttcctcgtttagcagcccaaccatatgatgacgctgatctaatcatttgggcgattataaattattacagaaggctcgaagataaggaaaaagtcgattacaaagacatttaccatttttatgatgaaatgcttgaagaagacttcaaatcaaaaggattgtcgcctgaagaaattgataaactaaagagtgctcgcaacaatgttttcagagacttggagaatgtgtacaaagaacctctttatgacacaggtgatgaagattaatggctagttataaaaacttcacctcgaaaaacaagaagcacacaaaaaacagaacagatatttacgacgcagcttttgaaacccctctgaatccagatgacaattcaaacttcattggcaagaatatctccaaatgggctgagttcacctcatttattcgtttttatccagacattttttacgatatgttgaaacccgaagtcggcggaattgagctggatttataccaaagagttatgatgagaacactcagtcgcttccctcagaactacttctgtattccacgtggcggatcaaaatgtgttgcaggagacacagttttatttactgaaaatggattagtagaaattggcgaactattcaattacgaaaaaaaagagtctgaagttgaaacaatacataaaatctcaatgaaaaacagatatggtctaatggaaacttctatggccggcatatcaagcggattcaagaaaacgaagaaaatcaaaactcaagatggctatgacttggaagcaagtttaaatcacccagtattagtaatgtgtgaagatggaaaactaagatacaaaaattctagtgaaattaaagttggagatttattacctatttcaagaaacaataatgtatttggaagtgaaacaaagctaaatgtaagctttgatgatttcttaaatggatttagcaatcaaggcagatggcaagtagaaagaaacaaattcaatattccagaatacattgatgaacaattagcattaattattggttatcttcttggtgatggttgcttgactagaaacaattcaatactttttacaaatgaagacgaagatatattaaataattatatagattattttaacaacgtattaggtattgcagttaagcaaaaagatagaattaattttatcgtatttggtaagctcattcgagaattcttcagacagttaggactggaagaaaaagatgcttttggtaaggaaatacctaaaattatacttaaagcacctaaaaatattgttgcaaaaacaatacaaggtctatttgataccgatggatgtgtgacaaataaaagcgtacaattttgcactgcatcagaaaaaatgagtaaacaagttcaaatgttacttttaaactttggtattatttctttcagaaaaaaatatctaaataaaaaatttaatacttatcattataagatcaatatttctacaaagaatattgatctttttttacgggaaattggatttagttgttcaagaaagcaagaaaaacttatatcaatatgtaacaaaaatcgcaatccaaataaagatgtcatcccttatcagcaagataacattatagcaatttatcctaaaggtaaaacaagagataaattttatcatgttcttaaaggatctaatgatcttacttacgaaaaattatcactattattaagtgaaaatgagcgttttgataataaagatagcgatgaattcaaccatttagtagagctttatgattctaattactattacactaaagtaattgaaacagaagactctgagaactacgtttatgatctatatatgcctttaaccaactcatttgtaagtaatggattagttagtcataatacattgacccagatcatggttgcataccatacagctatttgctttcctaatgtaacgttagccattaccgcttctacaaaggaatcagcggtgaaaatttggaaagaaaagcacgaggaaattttaaggttttacccttccattaaagatgaaatcaagagtgaaaacttttcaaaagacagtggtcgagttgaatttcaaaacggggcgatcatcgataacctggcaaacgcccaatcatctaagggtttacgtagaagacgtggctccttagaggaatctgccttgattgataaagatttatacgatgatgctatcgagccgatttttaacatccctcgtacaaccatgactggcgaaatagatcctgctgaattaaatgggcagattaaccggttctccacatcaggatataaaaactcagatgagtacgaaaaaatccttacgatggttaaggaaactggtgatcttaaaggatcctttgtattcggatcagattggcgcattcctattcactttggtcgtcaaaaaatgtctgttattaataaagcgcgacaagggaatgtaactcgcttccgtcagaattacctttgtgactggattggtgcaagtgacggcgcattgattaatatcagtaaattgatcaaagctcggacaattacccaccctgaactttcttgtcctagagataaaaataagaacttcttgctacatgaatatgtaatcggggtagacgtagcccgctctgcggctgaatcaaacaataaaacagctatcgttgttttgaagataatcagaaacagcaataacctcattaggcaagttcaagtggtcaatattatagagccaccaaacggattgagttttaaagaacaatcaatcatggtaaaaagagttttcaaaaactatggaggaaatcaagatacttctctctcaagagttaaagctgttattgtcgatggaaacggagtcggtggcggtttaatcgaccggttattagaggatgttacggatccggagaccaatgaagaacttggatgctgggccacaataaacactgatcaaaagccagatgtcccaaattcgccggaaatcgtttacaacctaaaatcccaaggtattaaccaagacattattactcaattcctggattatgttgagtccggaaaattgaagttgcttaaatcctatgatgacatcaagaaccaaaaaagcatatctgatgatgtaatgattgaagcagcatgtattcaaactcaattgtttattgacgaagtagcaaacctcagaattaaaaagacacagaattctttcactgttgagcaagttgtaaaaagaattgataaggataggtacagtgcaattgcttatgcgctgtattacatagctttatttttagaaaaggaagaatccgatgatgagtattcatttggattcttttttaattagaaattgaggaggtgaataatgactacatctgaaccacagtcatcatatgagtttaatacaaatttagcgccgcttgattcattgttctttaatgatttatttaacggtatttcttacgacaaagttaaatcatggctgaaagaccacaacgtctacaataaacagattagggatgcctctaaattgctttataacgcaaatggtgtgtatagaaacgttattgactacatggtagccctccctactttagacagagttattttgggatcaagtaaagtagctaatttcaaatcgaacaaacaaaagttcaatctggctttaagaaaaatcggcgacaaaagtgctgtcagggatgcattaggaaaactcagcaaatatggcactggcttttattattttgattctgtagtggatgattctttccccaccactctaagtgacaatgagatcggatcaataactgaatcaaatgctattgacgactttaattgttccgtcctccctcttcctctcgattattgcaaaattatcggaaggaaaaattcctcttatcagttagcttttgatgtctcctattttgataagttcacaagtaacgggagatcgctcaagcttagacgatggccagaagaaatcagacaaggctataggggttataagaaagaccaaaatcgaaaatggttagttcttgataacaataagactattgctgttaaaggaagtagcgacattgaagatcaatggggacgcccaatcggtttatccgcatttattgatatggtttatgatgaatactttgttgacactaaacgaaacattttagatgagctcaacagcactttaatttatcagactttccctgaaggtgatcaaaaaggcaaatcagccttatctcaaaagcaacaggagcagcagcatgagaatataaaaaaagcgttagttgctaaaggaagcgttaaaggtgttaagttcttctctttggcctctggaacaaaattagacaagttggaaactaatgtagatttcttgaaggttaaaggtgaagacgagctcattaaacgaatcactacaaatttaggatttgcaggatctgctctcaatggtcaagacggtaactattcttctcaacaaaccaatatcgagatggtttcttcccaaatattctcctggttagaacaaattcaaagtgagtttaacaaggtgataaacgccaatatcatcaaagatcctcgctcttatattgaggtttactacctccctcttacccacgttaacaggaaagaaaaagtccaaaacatgaaagacctttatacaagtggtcgaggaagccttattgcttggatagccgctactggatggaatcctgatgcttacttatccctaatggaatatgaaaaagacgaaggttttgatgaaaagttccctgttcatgcgacctctttcacaatgagtaagaataacgataagtcagccggcgcacctgagatcgatgatccgaaaaatgaaaacacgattaaatcgaagacaaataacagtaacggaacgccttctggctcttgagaggaggtgattagtatttgaaaagcacgattttagaaattaacaatcagaaaaaaaccagtggtcaaacatacatcaagtgggtcgttctcgaaatccatgaaaacaatactcagttcaacaagaacggtattacctggctggagaaatacataaacgctaaccttgaatcaatcaagttaatgccaatttgcgcagaattcttggatgatgaaaacagtgagccattcggacacggtttaacagaagtcaaggacggcacccctctctttgaaaacagcgcagtggttggtacgactaccaatgcttacattgacactattgatgttaatggtgagccaaaaagagtgttaatagctgaaggcttcctatacaaccagcgctatcctaaatttgttcaatggttaaaatcaaaaatgtttgatggcgatttccctgagacctcggttgagatagcagctgtagaagattcagatgcaattgaatatgaaggtggctggaaagagcaaggacgtatacctatgaaatttgactttacaggtgatgccattttaggtattgaccctgcagacgacgctgccattttgcttgaattaaacagtaaaaaaaaggaggataatttaatgccaaaatctcaagaagaagtagtccttgagttaaacaacaaacttgataataagaataaagaaattggagaattaaatcaaaaagttgagaaacttactgaggacttaaagcaaaaaactgaagaactgaatgccgctgttaaagctgcaaaggatgaaaaagctaaggctgatgcaaaagaaaaagaagcgcaaaaagctaaggatgaaaaagccaaggcagatgaagagcttaattccctaaaggaattcaaaaacaaggcggtagccgaaaagatgcaaggagagcttaaccaagctttaaaggaatattctcctgaagaaaaggatgtcgcaaaagagaaaattgaaatgttctctaagtctccttctgtcgagcttaaaaacgaaattatttctgaaatcaactcagcaatcgctcgatccttcatcactgaacgctcaaagaagcaagcctctgagactaatagcacaaatttcgatatttattcagaagttcgtgattctgggcaacaaagttcagtgactattgatgatctttattaagataaaataacacttttataaaatttaggaggaatactcaatgttcaaattcggaacaattggtgcttataaacaagtacgaaataatccacgttgcaaggctagtgtcgatttagtccctggtctagtcgtaatccctaacgattcttctggtaacgcattccctccaggtgcatcttcaactgcaaaaggtgatgtgtatgttgttggaaacattattgataaacctgaaattcgcaataaagaagacttcaaagttctaaaaggtgaatatgtccttgcttttaatttagctgacttaaaaggactgccaattgaacttagctcagacgtagtagttgattatgatgcgcttgttaaagatgacgtattggttcctgctgcagacaaatcaggtaaatgggttaaagctggagatgacgttgcagagtttaaagtatctctaaaagtcttagagaaaaatacatttggcggaaaaggtttgtacctaacagtacaggcttaattatattctggaggtaattattaatgtttacagttgaattaaacaatgttcaaaaagactcaaaccattatgcaaatgctaaattgaatgctaagtcccctattgtagaaatcttttctgcagctgcaacaggtcaagatctttccaagtttggagcaaaagccaatgctgctatgacccatgtgaaggaactagcttccaaagctcttatgggcaaccctgtagctaaagccgagatcaacacaattgtgcgttatgccattgagcctaagcttatttcagcaattaagctatttgattttatgggcacatttagaactatcggctatgatcagcaaccaatgatgacatcatacgcgcatgaatccatccgaagccaattccaagcttcccgtggtgacgtaccgttcgctactacaacttggagcgaatacccgattggaactcaaaccatttcttctggctatgctgttaactatcgtgagattcaaagtggaaacctcgataaagtagcagaaggcatggagcaagttcaaacagatatgatgaacaaagcgatgtactatgtagtaaatgaaatgttcaatgcaattaaaaatgcaacaggtgttaaatactttgctgaaactgaaggtatcaccaaatcatctgtagacgatattatcacaaagattcgccgatttggacaaccttctattgttggtgacttttctgttgtttctcagttaaatgactttgcagggttccaggctgtaaccggagatgcttcaagcactaaactccctcagtctgttatggatgaaatccgaagaacaggattacttaacacttataaaggttcttctgttgtagaattacctaatgcttataatctaactgaattaaataaagccggcgataacttcaaaacatatcttcctgaaggacttctcttcttcattcctcaaggtaaaaagtctcctcttcaagttttccaaaaaggcggactcacatcgatgaatggtaacgacattatcactggaactgagatcactcgttttgatatggaaattggagctggtgtagccaaaggacaagaacatcaaattggtctcatcagagacacaaaatatgaattaccacaaatttaaacaatttaaaatttaggagggctgtgtccctccttttatttttggagggattacatgtcttttaatttagataaaaagattacaattaaaaatttatgtccatgggatttatatttccgaaagattgactctcacggtgacttcagattgccggccaatggaattagacagatcacagctggggaagtgcaatcccaagtctatgacaatacctcactatttactggaactgacggtcaaggtactcatgccaaaatctatattgatgacaaagaaacccgtgtgcacttaggttttgagaccgaagataaagacgacaaacaagaaattgttactgtagaacgaattaaacaaatcttgggatacaaaacccaaaaagccttcgaagaaaatgttcaaaaggaaatcttacttgagtctgaaaaagctcagctgtttgatgtagctaaaaaagaaaagattaatgattacgctaagatcaagttcattgaagaatacactgggtttaaatttgatactcaatcataagggaggttaaatcttgactccttatgaaaaaataattaacgttttccactcaatgtttcaatcaaatgaaattctccctgatggccttgaacagcagtttttcattaacgcagttggtgaatacgaaaccgaactgacagaacttggttatgatgaaaagtccaatacatttaaatatccccttacttcatcacaaattcaagttttaggaatgcttatgtacaaaggattctctttcagatatcgagacagagccttaaaattaaacaacgttgtaggaagagatgttcaattgacaggtttatctaatactaaagctcaggttaatagatcctatgaagatcttgtcgatgagattgaaaaaaaaatgagcaaactgaaagtgaataactttgattgaggtgattagatgtctatagattggtatctaacctcttcttcaaattatttgagtggctgggaaaacgaagagtttaattcaaacaagtatgaaattttcaaagaaatcttagcaaattcacctgaaacttacgacattgaattgaatggtaagccagaacaggtgataattcaaaccactcaggacagcgaaacaaaaaaagtccttacagttttaggcttattaaatcgtggagacttgattttgtatgacggtagttactggttagttaatgcgcgccccactgataacaaaatgaatgacagtgctactatgcggctttgcaattcatcaatcagtctaacatcttctgacaaacttattgattctggaaagattgatgaagttacagggagaccgataaagattaaagtgcctggtgagaaggttgacatcccgtgtgtattagaacgaacaacctcaacaattggatcagaattggctataaacattcctgaagggcaagcacatgtcaccatcccttttttaaaacatgaaaaattaaagaagggtctttttctttctttttatggtgaggaattccgtgttgatgatatagactattccaaggtctatggagacaccggaacaattagacttatagccaaaaagaaagttggaggtgatagcgattgagtatgatggttgaacatatgacaactgtatttagaactattatgaatgatacagaattgaatcgtcttttatattataaagatgaccctctctcctcttctctccctgatgttcagacgttggaaaattattatgatccagttgatgattccccatcaatattaagctcaataattaaacgtgctcccaaaactgatgatttaaccgatcaaccaatatgcagactttgtgtttatctcggcaatggaatccctaaaccctcaacccaaagtgtgatgctgctagatcaagacttgatgattgatgtttatacacacattaacacttatgaggagaccgaattcaggaacctgaaaattactgatcgtatttgtgacatgctcttcaatcaaaattttgctggcatcggtaaaaatgttaaatatacaaggttgctcatatcaaatgcgcctgaagggtacttgggatacaaattgatattcactttcggagcaagtaaatgaatgtgttaaaggattttttctttttaggaaggcctattaatactgaagtcggtgcaataaactttatccacttaagagattacccagagtacataagcgagctaaatatgatgaaaatgagcaagaaggaaatcatcagaaacttttcaaaaatcaacaatgacggttcattaaatgatttaattatcgaattgaagaagaatagtctcttcaaaattgttcatgattacttacccgaatttaaccaggcttattttaaagtgtttagcaaagtatttgtggacaaggaatcactacatcttattgatcagagagcatttaacaatgttagaaaattgatattagagatgcattgcctgactgaagagaaaattgttgagaatgatgaattacaggagtttcatgatttgaataatcaattaaaactccaaaattctcaaaatgatttaaaggacatcgctagctgtgtggctgcatttaatggatacacatatcaagaggtagccgatatgacaatttatcaattgtacctgtcatattacagaatgggtgaaataatgaattataacacttctgcgttatttgccactgtatcaactgatgtgaaaatcggtgactggaatagtcatgttgatatgtatagagaagaaaaacaccacctcagtacagcagatgctaaaaatttagagcaattattcggagactgattcacagtctctttttcattttaaattaggaggaaaacacttggcaaaacaaacagttatccatgaagttggcaaggtgctaaccaaaagacttagtgaccacaaggttgttgcatcttctgtaacacaaatgactcagttctcccaacaagtccaacaagactttttaaaaggcggatggggaaatagagacctgtatgtcatcaactcaagcaaagaggtttcaggcaacgtaaaaaatgctttctttgatcttgattttatggcaatgcagcaaggtgtaaaaattgaaaacgagacgatttctgtatgggaagatgaaagtcttactgtaagtgataccggcacaatcaaaatcgcgtatactcctttatccaaagtctcacttacaaatgaagacggagatcaacaagaatttaatgtttcagacaaaacaattactgttcctgaaacgtttgctgctaaagggaacgctgtaacagctcactatcaaattgaagttgatgcagaaacagttgaaattagtggtgaaaaattctccgagaactattacttcgaaatccacacacttgagtacgatccaaagacatcaaaaatttacagtgacctttatatccagttacctaaagttaatttctctggtgaagcagacatgtccttagaggctggacaagcctacacacctgaaattggataccgagcattagctgatgataatggcaagatcggtacttttgcccgtgttaagcgtaaccctgatgggacaaaaggaattaaaactgaacaagaagatgcgacatcgaatagcagtgtagacattggaacaacgcaagaaacaaaataacgttaggagcttgatatcttggcacttttaaacaaagacggagacatttacacttcagctagagacgatggaactggtaaaccaatcaccgatattcatctaaaatcacaagaaaaaccactacaagttgactttcctcaagctggtttggatgctatcaaaggcatccaagtacaatccccttccgtgaccttgaatgaaagagatcctggtttctcctcttttaaaacggataaattcactgttacttcaacagctcaaaaagttaccgcaggtatcactgacagaacagcacttactatttacccacctgcagaaggcacgatttacattgggaactcaactgtaactgctgatacaggtatcccattaacagccggtgacaaacctttttcagttcctgtcgccgctggtaaaacactttatgtctatgtgatcaatgacggtactgacagagacgtaagagtatttgaagctaaataatttgaggggattcttcccctctcctttttaaataaaagtcagtttttaaacagatttaggaggtggagttgttgacagaaaccgatgaaaatattttaaaaaccattccagataaagcaacctttacattccacgaagcaacaactgccccgtctgaaggtgaagaatttgtagtatcacattatcgggatattactgttaagatctctggttcctcaacttcaagagaaataaaattctttgctgtagatgaaaatggcgaaaagacagaaattgctggaacaaacaaaactgattttcaattaggtacgggtacattgaatacaaatgaaaactgggatttcgatattgcggggcttttcaaattcatggttgaggtcatttccgtaaatggagatgttacggttaaaggaattgcggtgagttaatgagcagcagtaaatttgtaggtcagctcaaacaaaacaatatacaaatcaataaccttaaagatcaatttttcagaactgaatctcacatgtctgatcatgaaaaacgtttatccgataaggtcgatgagttcatggaaaagcaaaattcagaattaaagtcgcatactcagaacatagaaaacccgcaccatgtaactaaagagcaagtcggattaccaaatgtacttaatgaagagcaagccacaaaggtggcttttgatggacatcttgacgacaagaaaaatccccattcagttactaaaagccaagttggcttatctaaggttgataatgtacagcaagcagcgaaaattgattttgacgctcatgatgcagacctggatcgacatatcacaaaggacgagcgcagttattggaacagctccgatgaaaggtcaaagtcttttttagctgaacatactaacgatcaatcaaacccacacaaggttactgctgaacaggttgggcttgggaatgtagacaatgtaaaacaagctactaaaagtgactttgataatcatctgaatgacactaatgttcatatcagcaagtctgatcgagaaaaatgggacgctgctcaacttttcaaactcactgacgatgatgggaaagtattctacaaaggtagctccgaaaaaacggagtacaatgatttgattaacactgggttttatttaatcgcaaatcaggggcttcactcccctgccaacttatccaatgtctatttagctgtcatgaactatggaactacgattgcacaattcgcattagaagcatattacggaacacatacttatttccgttttagaaagagcgattcaacatggacttcctggcaaacacatgagacgactgacggagcacaagcaagagctactaccgcactcagctcggcgaaagcttacaccgatgcccacgaagcaaaaactgatattcacgttactttagatgacaaagccagatggagtggcacgtcaggttcttggaacccagttacacttatcaatggagctacacaatactccacttaccctttcaaattctcaagtgtaaacaatgtgttatggctaagaggatctttcggaacattgccggccattggaactgcagttgctaaattctcaaccaagccaacacagctagtggattttgtagtacccacaattggatcatatggaacagcgagatttgccttcacaacagatggagatttacgttttgatggattgtatgctaatgacattaacagtgtttccagagtttcatttaatataggaattcctttatggtagtaggtgaaaatattatgcatgttctttattatgatgagaactttatgtacgctggagaagacttcattgaaggcgatgctcttcctccaaatagtacaactgctgtcccagaccccacaataatcttgcccaaatatgatcccaagaaaaataaatggattgaatcagcaactgaagaatacaaggatagcgttaaaccaagtatccctgaacctaacgattttgaaataataggacagaccctatcccaactccgcctaagcttgcttcaagtcaacaaaacaataaacacaatgttaaaagatattgctgatctaaagggaggttcataaaataactacatacaattattgggttaatgccctgagtcgaaaatgggcaaccgtcgatcaagtcaaagaagcttaccaggaattcaacgatgtgacaaaagaagagctccaattaggagtaaagaatggtttagtcactttagaagagtacaaagaaatcaccggcgaagactacgaagaagcagacacagaataaaatacaagttttatttagacacctctcccctattgaggtgtcttttttaatgtgtgcagaggatatataaggaggaaatgagatggcatcgaaaaaattaaatcttgggttgattgaagaaagtgtaagtaaatatgacaagaaagaacgagtacaacttactgaggacgttcatgtttttatttacccttacttctcccctacccgcttaaccaaaatgcttactgaattaattactgacccacaaaatgctcaagaaaaaaacattgactttaaaagcataaatcctgttcaatggggattcttttcactaattaaagaatttacagacttgggtattccaagtgatatcaaaaacaaagttaagtggtttgttaagcttgtggactctgaatttttcccattgattattagtagcttccctgaagaaagcatgaagaaatttggagaagcaacaaagatgatgcaagagaatttagacaaactttcaaacatatctcctgaagaaataaatgatctcatccttaataaggtcgaagagattgagaatgaacaagaggctgaataatggccaagaacataaaagaaatagcagcattaattgaatttgccgcaaagcaagccgttcaaaaacaatccagcacaaaaaatacgatgattaaaacgggtcaagagcatgtacaatctgatgtatatgacacatacgatcctcttgtatatgaacgtacttctcttttgaaggactcctttgtcattcaaaacgaatataacggaatttcattagacaacaaccgtgaagacaacggcaaggatgttgctacggttgttgagactggtcaagggtacacgtatccagataaatacggctatggttacggaaaacctcgcccagtcatgaagaatactgctgaatccttaaaagatggacgattagttgctgctatgataaaagatttaaatacaagtggtattaaaacagaataacggtggtgtattaatggccagaaaaaagatagcatatgcaacaaaagaaaaggtcaacaaaattaaccccaaaaatgcggaattaatccgaaagtattttgtctttaaaaacatgaacctttcggaatccagtaaagtgggatatcaatcagatttcaatcaatggctggtatacattttagagaattacaataatcagcacattgtggatattattaaagaagatcctgatgatatggttgatttaattgaagactttgttgcattttgcaccagtattctaggcaataatgaacgaagaattcagagacgaatgagtagtattagctcattctttttatttttaaggaaaaaacgtaagattaaagagaatcccgttgacttcttagacaggcctaaagctggaactggtgaaaaacttcaaattaaacagaccttcctaacaaaagaacaagtcgaagaaatcagaaaaggacttaaaaagaaggaaaatattcagttagagctcttctttgaattcggtctctcaacgatggccagagctaatgccataagcaacgttaaggttgaacaaattgactttgaaagacttcgggtggaagatgtcattgaaaaagaaggatataaagtcaccctcttcccttctcaaagagctattgatcttgttaaggaatggctggagtacagatccgaaaacggaattgaatgcgaataccttttcataacaaagtacggaggcatatggaagaaagctgaaaccggaactttacaaggatattggataaagagaatcggagaaataattgatattcctgaattacactgtcatgatttaaggcacagtggtagtaaccttctgtatcacagtggcatgagtctagaggacgtgtctcaattattgaaccataaaggcactgacgtaacaaagaatcactatctagaagtaaacaaagatgctattcaagacaagaaagcaaaatttgaagtgtaaatgaaatccctcttttatgcagaatcaagatccttctaccgaagggttttgcttatggataaaaccttaaacttatttccatatttgacgataatatggagaggtgaaaaatatgaataagacaatacttaaacacaatttagtacagatgaatagtcgcgacctgatcaaatacatacaaaaagaattcccgcactctggtgagctctacacagaacaaaagcgcaaatttcaaatcctaaaatcgctcaattcatcagatttaattttagctatttcccgtatgagtcgaattgaagcgtccttcgatcatacgaaaatgtggacagttggaagtgtgctcataggaacatgtttactatctctcagaattatgtttagttttaatttgctttggtatattctaatcgcaacatcgatttgccttctcctactttttgttgtacgaaaggatagggacattgttattactgctacatattttaaagaattacttgagcagattaagtccgaaaaaggaaagtgaccctcccctttgctagttctacacttttggaaatcatgatataatgtaggaaaataatactggtggtggttggatgggctataagattatggcttatggtggctattttttattcagccttttcttctgtttaatggatggctggagacctttgggggtttttctgataattggcggtttggcttatttagcgctcgaaccttacagaataaaaaatgcaactgttgctgaaaagattagaaaaaatgctgaaacactaaagacctatgatagcgaatttaaccctgataatttctttagcacttataaaactaaaattgcttacaatgaagataaatctatccttaaggtatatcagctaaatggagaagaaataaacgagtatgttgtcccttttgcccaaattattcaatctgaaatctcactggatgaccaggtgatttcgaaggttgccaaatcggggattattgctggaggattattaggcggcggaattggtgcaacaattggtggtttgtcagcctcctctactcaaacagaaatggtgaagtcaattacgcttaaaattacagtcgaaaacctcaaaaatcctatacactatatccacttcctcccttctcgcgaggatgatggatatgagcctcaaggttataaaaaagatgggaatatcatacagcaagctttaaaaaacgctgagtattggcaaggtgtcatggatgtaattatcaagaaaacaagtacagtcgctcaataatttgagtggcttttttatttgctctgattagccccacttgaaaggatgtgacttatttttgagtcaagatttaaaaataatactgaccccaaaagctgatacctcctcaaagactgtcgaacagttaaatcagcaaattaaatctttagagaaaaagcttaattcccttaatttaaagaccaatattgatgcctctgctttaaagactctcaacgaattctcctctgcagttgacacttaccaaaaacatctcaaatccttcaatcaaacaattaaagaaaccacaacggttaccagaaatgccgatggcactgttgaaaagctgacgcagcaatataagaaaaatggcgaaatcattcagcgtgaaaagaaattcatcgacaatcgtaatcaatcactacgtgaacaaacccaagaagttaacaggcttgctcaagcgactgaaaaactaggtcaggtacagaaaagaacagaacagaagaattctcaaggacaaacgacgagggtaactcaaaagaaccgcaatggcttcgatgatataacatatacgactgatccaaagacaaatgctacgtcatcaaaagttacaacaaattacgatcagcaacgaaaagcaattgaacaactaaagatagatttagaaaaacttagacagcaaggaattgtaactgacaccaccctctcttcccttgggcggaaattaaacactgctcaaacagctcaacaaattgaagcattacaaaacagaattaaaatgctcgatgataagtctgctgctgtggctaaaaataatgaactccgaaaaactattgagctttatcaacgccaagcacaggtaaacgtacaaaaccttaatacgcgttatggcgatacgatgggcgctggaaatagacaagctatccaagagtacctcaatgcagttaatagccttaatgtaagtgccggcggaagcaatatcagagctcaaatgcaaagcttgaacatgcaatacagggaattggcttcaaatgcgcaagcagcagctagtcaagcctcgtcttttggtgcggagctaacgcaagctttcaaaagtatgtctacatatttaatctctggttctttgttctacggcgctatatctggactcaaggaaatggtatctcaggctgttgaaattgatactctaatgacaaacatcagacgtgtgatgaatgagcctgattacaagtacaatgaacttcttcaagagtcaatcgatttaggtgacacactttcaaacaaaatcactgacattctccaaatgaccggtgatttcgggcgtatgggcttcgatgaaagtgaattgtcaactctaacaaaaaccgcgcaggttctacaaaacgtctctgacttaactcctgatgacacagttaatactttaactgccgcaatgttaaacttcaatattgcagccaatgattctatttcaattgcagacaagctaaatgaagtggataacaactacgctgtaactactcttgatctggccaactctattcgaaaagcaggaagcaccgcttcgactttcggtgttgaattaaacgatctgattggttatactacagcaatcgcaagtaccactcgtgaatcaggaaacgttgttggtaactcacttaaaactatttttgcccggataggtaacaaccgaagcgcaatcaaagcgttggatgaaatcggaatttctgtaaagactgcaggcggagaagcaaaatctgcgagtgagttgattaatgaggtagcagccaaatggaacacattaactgatgctcaaagacaaaacacctctattggcgttgcaaatatccatcaattgtctcgatttaatgccttaatgaacaacttctctatcgcccaaaatgccgccgcaacagcttctaattctgcaggtagcgcttggagcgaacagcagaaatacgcagatagcttacaagcaaggttaaataaacttcaaaacaatttcactgaattggctatagcttcatcggatgcctttattagtgacggattgattgagttcactcaagctctgggttctttgttaaaagcctccactggaataattaacactgttggtttcctccccctctttttgtgacgattagcactgctacattgttactcagtaaaaacactcgaactttagctacaactcttatattaggctcaaaagcaatgagacaagaaaccttagctagcatcggattagaagcaggtatgacccgtgctgctgttgcatcaagggttttgaaaactgctcttagagggcttttagtttctacagtggttggaggcgcgcttgctgcgttgggttgggctttagaaagcatagtttcatctttcgcagatgcaaaaaaagctaaagatgattttgaacagagtcaacagaccaatgttgaagcaattacaaccaacaaagactccacagacaaactaataaaacagtataaagagcttcaaaaagccaaagattcaagaaccctttcatcagatgaagagcaagaatatcttcaagttactcagcaattggctcagacattccccgctttaattcaaggttatgactctcaaggaaatgcaattttaaaaagtaataaagctttagaagaagctattgagaacactaaagaataccttgaacttaaaaagacggaaactaaagacagcgccaagaaaactttcgaggacgcttctaaagaaattaaaaagtctaaagatgagttgaagcaatacaaacaaattgctgattataatgataaaggcagaccaaaatgggacttccttgctgatgatgaagattataaaatcgctgcagataaagcgaagcaaggtatgcttaaagcacaatctgacatagcaagtggaaatgcaaaggttagagacagtgttctctcaatcgcccaagcatacagttctatagatatcagcaatactttaaaaacgagtatcaatgacattgtaggtaaactcactttaaaagatgatttgaatcctgatgatctcgataaattctcttctgcattgggtaaactccaagagaaaatgcaatcggcattgaattcaaacgatgaaaaagcatttgatagcgcgaaaaaggatctgcaaacccttttggagacctattcaaaatccagttcttctattgatgtctttaagttgagttttgataaggcacaaaagaacattaaagatggagataaggccatttcttctgttaaatcggaagttggtgatttaggggaaactcttgctgaagcaggtaatgaagctgaagattttggtcaaaagctcaaagaagcgcttgacgcaaatgatatcagtcagattaaagatgtaatcaaaggcatgtcagagtcaatgcagtttgactctgttcaaggcattcttaacggggatatttttaataacaccaaagaacaagttgctcctttaaacgaacttttagaaaagatggctgaaggaaagagcatttctgccaatgaagctaatgctctaatccaaaaagataaagaattagccaaagcaataagttatgaaaatggtgttataaaggttaaccgagatgaagtaattcgtcagcgaaaagttaagctcgatgcctataatgacatggttcaatatagcaataagctaatgaaaactgaagtcaataatgccattaaaaccttaaacgctgattctttacgaattgacagccttagaaagcttcggagagagcgtaagctcgatatatccgaggcagaattgtctcagctcgaagttaaatcaatcaataatgtagctgatgcgaagaaagaattacataagattgaagaaaaaatgttgcaacctggtggattttctaacagccaaatctctgcaatggatagcgttagagctgctcttaaatcctacatctcagcatctgaagaagctacatctactcaggaaacaaacaaacaagcgttaatagaatcaggtacttcccttgaaaaatggacagacgagcaagagaaagcaaatgaagaaaccaaaacgtccatgtacgtggctgataaatacaaggaagctctggagaaagttaatgctgaaatcgaaaagtacaataagcaagtaaacgactatccaaagtattcccaaagttatcgaaatgccctgcagaaagaaattaaagctcttcaacaaaagaaaaagcttatgcaggagcaagccaaactcctcaaggatcaaattaagtcagggaacattgcacaatacggtatagttacctcttccctttcctctggttcatcttctggtggttctttttcttctggtggtgggtcttactccggtaaatactccagctacattaattctgccgcaagcaaatacggtgttgatccagctctaattgcagctgtaatccaacaagaatcaggattcaatgcaagagctcgctctggagccggagctgctggtttgatgcagttgatgccttccactgctaaaagcttaggcgtaaacaatgtttatgatccttatcagagcattatgggtggcacgaaatatctagcccaacaactaagcaaatttggtggcaatgttgagaaagcacttgctgcttataacgcagggcctggtaatgtaattaaatatggcggcgtccctcccttcaaagaaacacagaattatgttcagaagatcatgtcaaattacacgaagtcaatgacttctgccaattcctccattgcaagctactacacgaagaacagcgcgtttagaataagttctaagtatggtgctcaagatggcgcttaccgatcaactccacataaagggacagactttgccgcaaaagccggtactgcaattaagtctttgcaaagtggtaaagtccaaattgctggttatagtaaaactgccggtaactgggttgtcattcagcaggatgatggaaaagttgctaagtatatgcatatgcttgataccccttctgttaaagccggtcaaactgttaaagctggccagaccatcggtaaagttggcagtacgggtaattcaactggaaatcaccttcatcttcaaattgaggaaaacggaaagacaattgaccctgagaagtatttaaaaggtgtcggtacatctatttcagatgcgtctcaagctgaagcagaacgacaacaagcaatagcgcaagctaaatccgacctcctctcccttcaaggtgacattaattcagtaaacgatcagatacaagagcttcaatatgagatcgttcagtcgcatcttgatgaatatgacaagcgcattggtgattttgatgtaagaatcgctaaagacaaagccctcgctagtcattatctgagcgatagtaaagagttccgtaagtatacaaacgatcagaaaaaagctttaactgaacagcaaaagattcagagtcagaaggtttcttttattgaaaaagaaatcaaaacaaacaaaactctgaatgccgctcaaagagcacagcttgctgaggaattaaaacaagctaagattgatctcatcaatttccaagaagaagtaagagaacttcagggacagctcatccaatccaaagttgatgaaacgcttaacggtatagagaaatcaaccaagaaaactgaatccaagcttaaagatgttagcaacaaaatatccatgaccgaggaagataaagacaaggttaaatattatagccaacagattaagcttattcagcagcaacagaatgaagcgaagaagtatataaaacagttggaagcacaaaagaaagctgctaaagggttcccggatattcagaaacaaattactgaagaaatcgagaactggaaagacaagcagaaggattacaatctggagctttacaacacaaagaaatcaatcaaagatgtgtacaaatcccttgctgatgaagttgtctccatctataaagagatgtacgaaaagatgcgtgatattgaattaaaagcgcaccaaaaagcaacacaagacttgattgatgagatcgataaaactgacgatgaagctaaatttcaaagacagttaaaagagaagcaagagagtatccaaaaactcactgaccaaattaatcagtattctcttgatgactcagaatttggtaagtcaaaggttaaggaattaactgagcagttacaaaaggaacagttagatttagatgagtttcttaaagatcgtgaaagtagcaaacgtaaagaagcgttgcaagatcagcttcaaaaagacgaagattcaattaacaagaaatatgatgatctcgtcaatgatgagcgtggatttaaggaacttgagaaaaagctaatggatgggaagattactgatattgctaagcaactgaatgaattctctaaattcattaacagcaatatggagtccattggtaaaagtatctctaataaccttatcgataagcttaaagaagcttctaatgcccttaatactgtgaccaaaggcaatacaacaggcaaaaaaatatcttcatttgaaacaggaggatacacaggaacaggtttaggtgctggcaagcttgctattcttcatgataaagagcttattctgaataagactgacaccaagaacatgcttgaaactgtaaagtatgttcgcaatctgtctgataacgatctgaataatgaaacacctaaatgggggcaaggtggaaaattagcagctttgattaacaaagggattacttctattccatcaataattccgaatattaaccaagcgagcctatctaatagtttgataccaaatgttaagactgctaacctgccccctaccacaaccgttaattctaatggtgataaaacaattaacacaccaataattttcaatgttgataaacttactggtggggaaactggagccagaacaatgctcgaaaccatcaagaaagaagttataaaattaaatggaagcatgtaagagtctgtataatgcaggctcttcagcttgctttttgattggtaagggtggaattttatgattagagaaagtcaatatttcatgttcgatgatatcccctcttatgaaattggggcagtgaatgtaaacacagagggcggactattggaagagaccttcgtagcgaatagaacagtaaatgaaacatatacacgatcagcttctgaaccgtatgtagacagtgttaaacgtgaaccatatgaaatccctttaaacttttacatagaagatcatttagatgaagaaaatattcgaagagttgcacgttggctaaatgtagatgattataagcctctttcattcagtagtaatttagatatcatttattttgctttgccagtgaatgcaacagatttggtacacaactgctctaatgacggatatgtgaagctgacaatgaaagtatttccttataggtatggacgagaaacaactacccattggtatgacatatcatcaggttctaataatatagaaattaaaaatataggggatttagatatcccactctctcttgaattcaaaaaaatcggtgatggagacatcacagtcgaaaacttgacagcttataaagaacctctaaaattcacatcaattaaacatcaagaagttattaatgtagatgccaataaagagctgatcacctccagtgttactgggtatgagtgttatgatcaagtcaatgaacagtatgtttttttaacaagggggataaacagagttaaaataacgggcgaatgttgtatccggtttatatacagatataagtatttgtaaggggatgttttattgatttacgattttaaaccaggccatctcaaggtttctttagcaaaaccaaataaaaagaaaatcgctaatatagtagatttctctaacgcctctctaaatttgaattttgatgaactccacgatctaacttttaatatcccacttaaagcaagatataatttcaagatgaagccaaaccatgtggcagaactcataaaaggctggtatctcattaaggcagagttcttaaacagagttgaatggtttgtaataaccggattgacaaagtcagaaaatgaggaacaaacaatacaagttagagctcaaggacttccctacattcttcataaaagcaaaatcaaatcatatgaaggcatctctaaaaatctgttggaagttgccacagattgtcttaaaggaacttgctttactgtagactttattgacccctcttttaatgaaaaacgccgctcatttgatgttacctctacccgatatgagtttttaaagaacattggagaaacttttgaggctgtgcctatatttgatactgtgaacaacacagtatcattttataaaaaagaaactgtgtccaagtataaaggtgtccaattctctcctaaaaggttcatgattgatatggaagataccattgatattgatgaagttgtaacacgattagacattaccggtaaagatggaattgttattaattcagtcaatcctactggacaaagttacttggatgatttctcttatttcctctacccttttgaacgtgatgaaaagagaaatgtaattaagcatagtgattacatggatgatgatttgtgccatgcaattttagattacaatgaacttgtaaataaagaaggctcttctttttacctccttttaaatcagaaaaaagatctggaagcaacaaaaacaacacaggagaataccctcttcaccctagaaaaaattgaattacaacaaatcttagataagatcacagtagcaaaaaaagctggagatgacacgaaagaccttatcaagcaaagagatgccaaacaacttgaagttacatcaaagaaagctgaaatatccaccactgccaatcagatttccaagataactgaagaaatagcagtgttaaaagatcggttatctatggataagtttctcggtgaaaagctaatgaaaaagttgtcttattttatccgtcaagatgattggtctaatgacaacatttttgatgaaacagagctgtatgaaaaaggccttgaggaacttggggagaaaaatacacctccggtagacatcagaacaaacattgtcaacttattcactgtcaacaaagaaaaggatttttgggatagaatttacctgggagatataatcagattagttaatgacgattttagaactgatgtcaaagcaacacttacaggaatgaattttgattttgagcagcaaagtatacaagtaacactctcgaatggaaaaagagctactacgatagaacaagactttgcacgctcattgtatactgctaagaaagcatcaactgaattcaataagaaaaagattgattatgataccctactgaccaattacaatgcacgaaatgatcgtatatctgcacccgtagcaaacccaactatccgaaatgacgggactgctataactcatgttgtaaatgataatggatctgtagatgtatcaattgaatgggattttccagactccgatgaggataaatacaatatcgatggttttcttatccattgctactctgacacatcagatgatacctatctttttggtgcaaagatgtcagctgaacaatatttatcagttagttatgataaacgaattgcaacattaaccggtcaagtttcaaataaacactatacatttggagtccaagcctatcgcacagtagagacgtccattgatagcagtggtcgaatactatctgatattgtacagcctaaattcccctcagaaaacccctacctcccctcttctactgtagaagtcaaaggtaagcttaatggctcgaaatacactgtctcctcaactgaacccgaagagccagaagcaaacgatttatggactaatacggttaccggtgttgtttcctcttatgacggcgaaaaatgggtttccagtgaccagaaaactgctgagttagttgaaaccacagcagcacaagttgacactaaactctccgactatgatagtcgtgtccaaaacattgagctcaataaccttttggtcaatcccctgaaatggaaaggcggaaatgtttctgcatttggtcgtaaatattatgctgatgttagttatgactcaactgttttaaacttaaatacaatcactattcctatccttattaatgctgtggatgcttcagactcaaatccaactgttgtggattacacttataacgaagcgtgggatatgatccctaaactcaaaaatgacgggtacaacattattttagaaccctaccccttcatcgcaaatggaacgatagctgaaaccgattgggcaccttctgatctagaccaatggttcgtagcatggaacaacatcctgcaagacttcgctaaaaaatgcgaacaatttaaattagacggtttatacattgcttcaaacctagttcatatggaagactcaacagaaaagtggaaatcagttattacaagcgttaggagtttattcagtggaaagatgctctaccgaacaaattattgggtaaccgctgattgggctcccgaaacgattgctgcctacaacaaaaagctgaataatcctctattcggactagtcgatattattgcaatagcggcttactttgaattaactgataatcgaaatccatctgtcgatcagctaattgatgctatttatagcgtaccgttatacggacgcggacaaaatatattcaaggaaatcaaagcattttatgataaatggaataagccgatcttctttggtgaacttggcatcccaccttacagtaactctcctgaacagccccataacgcattcggtgacctaggggaatacaatgaatcaattcaggcgaattggtttgaagcatgggttagagtttttcaagctcaagattggtggcaaggatattctgtatatgcaatttcagatgagaagtctgtttacaacgtaattgacaagaaagctgaatccattattagaggacaaacattaggtggtactaagggcagactgcagagtttagaagagagagtcgcgcacttagaagaattgctcaaatcaattacacaataagaaaggacggtgaatttagtttggattttcctcagctctataacgaccctaccctttctcaaaaaaggaagggttcaatcgatgacccttatttaagctatagtgaaactttaactgtttacaatggtcgagtcttacttacagaagtacctaaccgtgagtacagagtcgaggttagtggtgacagtaaagaatggcgagaaattgaagatggtgaattagaagacaactactttaaggttgattaccttatgggagttgtctttttcaatggttcaaatgaaggcaaatcacttacttttgcatatcaaggagaaggcgcatccttcttccctgcctcaagaatttggattaaacgacaaggaaatatggtcattgaaacgcttcaaggcttaattgatgatgctgaagatgccattattcgtatcaatgaacgtattgctgaatgtgaacgtgtcaccaagcgctgtattgaaataacaaattggtgcagacaagcaacatcagattatgagtatgtagttgagaatactaggaagatttacttgccgtttgtgtacacctatcaggatttattgaacacttatccttcccctcaaattggttggactgtcactgtaaaagaaacaggcattgaatatcgatgggatggtttcgactggataaatattagcgtgtcagataagtatgatggtttcaacattgtttctagctatgtagagccttacaacatcagatcagtatggttgagaacgaacaatgctcccaaaaagatgaggataaaaccatctgtagaaccccctgacggaagcatggtttggattagaaaaggataaggaggagtatatattgagcgacaatttaattcccgtaaacacaatgggctataaggacgaagaaacagagcaatggatacccattgatgccatagggttaaaatcaaataatattagatatactgcagacgatattcaagaggcttttgataaagcttctaaggatattaaaaacgtaataagcacagtcgattctggtttaacagatatcacaaacactattggagacatttcaaaaatccctgcagctggtgcaacaattgttgataaagtcttaaatgagtttatcagacgaagtgtcaatgttcaggattttggagctaagggtgatggtgttactgatgacactgaagctttcaaagctgcctttgccagcgggaagcgagaagtttttgtacccgcaggtatttatatggttcaaggattacatatcccttcttatgtcagactttacggtgttggatcaggatctattatcaagcttcacccaactgctaccggaacatcttgtgtgttaaccaatagcgactacacaaacggaaacgaatatatcttaattgaagacttagacctcgattggaatttagacaaaaaggacaacaccattacaaatggaacaaatgcaaactgtgtggggattgttaactctaaatttgttcgggttagaaacgtcaatgctcgtaatccaggtgtacacggttttgatgtaagctcccctgtttggaactcttcttctgatggagcagatcattatcagccaaatggtagcaaatatgtttggattgaaaattgtactgcaactaactatggtgatgatggcttcacaactcactattcagactacatcttcttcactaactgttacgcctatgacgctaatggatccgcacacagcaaaggagcttcaaattcaaacggttttgaaattgatgatggctctaaaaacgtatggcttgtgaactgttacagccgaaaaaattgcaggggttttgaagtcaaagctcacaatagagcacctgcagcaagaaacgtaaacttaataaactgctattccgaaaatgatatccgcgctttcgactttagacatattggcttccacctagcctccgaaaaaatctccacaagtgcatttgacattaatgtcgttaactgcactgcacaacatcctattttcagtgacctttatcaaggtttaaatcctcgcgcactagtcatttccgcttatagaaatgtcaacgtttcgaacttcaacgcaattggtgatccaacctatgattataaaaacactgcaatcatcaccacccaatataaaagcaaaaatatcaacctaagcaacatcactgtttcgggatttacaacagcgagtaacgatatctatgtaatcggtggagctcaaaaatcagataatgtaaacatctcgaatgtaaccattaaccaatctgctttagttggtattgctgtgggaagtaaagttggctcagtcaatatcaataacgttaacatgacgggatcaaacaaagcaggttcgataggtgtttactgcacgaattcacaagctaatattagcgctgcgatgtgtgaacaatacgctactcccagtaaaattgccggaaaaacctacacgtttatcccgaataatttcaagggcggtctacgtggggctacgacttctggctatgctaaaacaaatactagtgcagtattagcttcatcgggtgaacctcaagcacttggagatgccactttagttggagctactaccggaggatgcgttgcaaagggaacaagaaccaacgttttcggctcatcaggcggaagctctgtagatggatctcgtagcggtgtttacaactccaatgattctcatatcgaggggcaaaatgtatcacgtgaaatccacgcttctggaggtgtaaaacttggtgaaaatgatcgctatatggtggttggcggatatggcgctactccgtccagagcaaatattaaatggatgctaaactccatgaatggggatataacatcggcaggaaagatgaatggcggagccacctttagtgattacgctgagtattttgaaagtcttgacggaaaagcaattccgacagggacaattgtcactcttgaaggagctaaaattcgcccggcgagaaaaggtgaagatgtacacggagtaatctctgaaactgcaggaactattctaggaggagctgatattcactggcaaggtagatatttaaagaatgagtttggtggatacatatatgaagatgtggtcaacccagaaaccggtgatgttaagaagctgcctaaagtaaaccctgagtggattgaaaaaatagattacgtccctcgtgaagaacgtcctgaatggaatatagtaggattgcttggacaggtttatgtgaaagtggacagtactgtttctgtgggagatcgaattgaaggtaattatggaatcggcacaaaatcagaagacaggttttactcttggaaggctatggagattgtaactccatattcagacaagctcggttacggcattgccatctgcttaattaagtaacccttaaaattaaaggaggtggttatgttctagttaaaatataaattttattcaatttacggcattcaaaaacagagataacaagagcatacgtgagataaagagagatagggatttgtccccttctctcttttttgtgctcaaatttaatttaggagagatgtttaatatggctattcaagcgagacaaatgttagtatcaccagacaaatattcaatcaaatgtccatatgcattatctgcttcattcatcacttttcacaatacatacaacgacgcaccagcgcaaaatgaagttagttatatgatcggtaacaataatgaagtttcttttcactttgctgtagatgataaagaggttgtccaagggattcctacaaatcgtaatgcatggcatacgggtgatggatcaggtgtgaattcaggaaaccggacttccatcggtgtagaagtttgctactctaaatcaggcggagagcgctataaaaaagctgaagcgttggctattaagtttattgcacaactccttaaagaacgtggctggggcatagatcgagttaaaaagcatcaagactggtctggcaagtattgcccacatcgagttcttgatgaaggacgttggaatgctgttaaagcttctattgctgctgaattgaaagcactcggcgggaaaacttcttcctcatcttcaaagccaacaaaagtcgttaaaacaaatggctcttatgttaagaacacagttatcgcagacagtcttaatgtgagaactcagcgcaatgcgaactcctctattgtacttgcccttcctaaaggctccactgtccaataccaaaaaggatcaactcaaaatggttggggttatatcaaatatacaaactccaaaggcgctacatacagcggatatgtaaatgtgaaatacattaaaagtgatgctgagcttggaaaatcaaccccaaagcctaaacccacttctaagcctgatagcagtggaatcaaatctgtaggcaagattaaagttgtcggagtaaaaagcgctgctatcgtaatggacagacctgataaaaacaaagcgaagaatctcggcactgtggagctaggtgataccgtcagcatttctggctcagtgaaagggttaaacaatgctaagggttactgggaagttatctacaaaggtaaacgaggctacatctcaggacaatttggctcaaaaatctaaatatatttaaatatctttgagaatgattgtagctcaaagtgtatcaatgattatttaggaggtgatgtgacattacctcctattttttatggaggatgattgcattgtggctgaaaaagaaaactatgaagttttaaagaccgaggtcgctcatataaaagaacgtcttaaagaacaagcagaagatagaaaaatcatgttggaaacacaaaaaacaacaagtgaatcgctcattaggcttaccactgttgttgagaatcaggaaaaaaaccttgttgaaacaaaaaatttgttcaccactgagatagctggactaagaaatgagtttcagcaagttaatcagtcgcaaacaaaatggcttcaaaacttattagaaggaacattcggcaagacattaaagattttagttctaattattctcttactgcttggtgcagagatcgctggtgttgatatcaccaaattagctaatttataaggagacgatttaatgactaaaattaactggaaagtaagacttaaaaagaaaacattcctggttgcaatcttctctgcaactcttttgtttgcacaagcaattgcatctgcatttggatacgacatttctgtgtttagcgatgatcttactgagaaatttaatgctttgcttacatttctaactgcaatgggggttgtagtggatccaaccactacaggtatctcagacagcgatcaagccatggaatacacagagccaaaataacttggggagtttatctccccctttttttcattttcaagaagaaaggaatgattgttgattatgcaaataggatctggatatatcggaagtccaatgcttgagaagtcagaatctaaccatgaagtaatcccctccccacctgcaacctggacgattaaatattctttctataagttcagcttttcgaatgatcagaaatgccacgtatcaatcaatggtggagatcctatctatttaagggctggacaaggctttcaaatggacgctcacgattcacctatcacaagcttcaaaatttctgagtcaggaattacatataactttttgggggcgcataaatgagttttttcaatccaatggttaatgtctcaattgtcactgggaagtctgcttatgaaatcgcagtggacaatggtttttcaggaactgtagaggaatggttagcttcactaaaaggtgaaaaaggcaacactggagctactggcgctaagggagacaaaggtgatactggtgcaaccggtgctaaaggagctactggtgctgccggtaaagatggaaaatcagcatatgaattagccgttcaacaaggcttcactggaacattagatgagtggcttgcttctctaaaagcaacagcaaactgatcatatacccttctctaacgaggagggtatttttttcgtttcgttcataatcgaattattgatttgtttttaattttcactcaaattccctttacatttctttcctccaatgcaactatataataaaatggatttgaaaggggtttaggacttggagaacgaaaaggtcattccttatgatttagtagcaacaaagatgaatcattggtatgtggctattaaaaagaattgggtcggtagagcagaagaaatgcgtaaagaagttatgcaggaaataaaaattatggaagaaaaccaagatgttttactatactactccctacttgagtttagacataagctaatgttggcatatatgtatcctaacgctataaaagacattgagaaaaactatggtgagttaaaagcatacgaaggccatgaaaacttaactggaatgctcgaatattactattattttttcatgggcatgttctattttagacaaaaggagttggcattctcccttaatcactatagacaagctgagagatatttggattcaattgagagcgaagatattgaagttgaaaaagctgaattttattttaaattgtcagaagtgtattaccacatgaaacagacttatttttcaatgaattatgccatgagggcttacgatatatttaaaaagcaacctgctattgacgggagccctacatacggggtacaaaaggtacgctgtcaattcgtcatatttggtaatttattggacagtatgaagtttgatgaagctttaaagcaagcatacaaagcgtatcaggaagcagtagagctaaacaaaagtgaaaagaatcgtgggcatttgatgcgttcagcactgtttaatattggattatgttataatcaaatggaagaacttgataaagcattttttcactttaataagtcacttcaaatcattgagccggaaaatcatgattacgctgctaaaacattatttgttatctccttcttaaagggaaggcaaaatgacattgaaaacgcaaaaaaattttatgaacaggccaaacagttggctgaacggcataacaatgaaatggtacttgaaaagttaaaaatggttaaaggacttttcttggactatgatttagacttagttaggaaaacattcgagttcttcaaagaaagaagtatataccctgacatggaaagctatggtgtctctgtagcagattttctcactggaaaacaggatgcttggggtgcagttgaattttatcgtttggcaaatgaagcaagaagacaaatcaaaaggggagaagcaatatgaaaactaaactatttatctgtgcagttctattattcggcgttgccggaacagtgggtgcttcctatctccaacaacaaaatgatacgttcaaggttgctgaaagagccgaaacgtaaaaaactaatgactttgtaaggagaacagagggagctgctctctgttctcatgatttatgtccacccgtcaaacctgctctatgcaaagctgtgcctccaggtgtataagaaacagctcgtaagatcgctttagatccgtatttgtttcttatcccgtccataacgaatccaagctttcttctcttctcattatctttttcaaacagacttaattgttgatttacatcatcctcaatattggataaggtaactgaaacacttcgtaccgttttgcctgtatagaatttatcaaacaacatcaagcaatatcgataaatatccattgtgatatttgtaggcaaatcaatcgttttagctctgtgaaagccgccgctgaactcatctttactgtaaccaatacccaagctaattgtgcgccctactttgttatgtgttcgtgctcttcgtgcaacctcttcacaaatctccaagagaaccgccttgatatcctctttcttcgtatagtctctaagtaatatctgacttttcccgtagcttatttgcccttgcatcaaaggagctccaatttcagaaaggtcaattccatgtgcatgataataaagctgattgcccataatgccgaatcgtttttcaagtagctctaatggatatttagctaattgaccaacagttgaaatccccatccggtttaaattcctctccatcctccctcctattccccacatttcagataacggatgaacacaccaaagcttatttggaacatcttcatatctccaccgtgcaatcccagtctttgttttcttactctctaaatcaagagctaacttactcagcaacatattgtcaccaataccaacagtacaaactaagccaaactctctcttcatactgctctgaattgcttctgccatgacttcaggattttcttttcctgcatctaaaaaagattcatcaattgagtacgtgtgcacacatgtttcaggaacgaacctgtaaaacaatttagtgatttcagttgaaactctgatgaaaagtttcatttgcgggtttactatatgaatttttggatcatctggaatctcaaataaccgggagccagtcttgattccataatcttttttaagtgcaggagacgctgctaagacaacacttccctgtctatccgtgtttccgactacagcgagataacatgtcattggattcaatcccattgttacagctgaaaccgaagcataaaaggatttcatatctacacaaagtatatttttacgtggaaactgtgagtaatcaatcattgtaagcaactcctatgatgtcattcatggtgatgtatacggtttgatcatgatgatcttttacgtgtaatttgtgttgttcgtaattgagatattgaactgtaccgattaaatcctcagcaaccccttctttaaagagcttaaactttagttctttattcaacgccattgcttcagaaaccaggatgtcaatctcctcaatttgttgctcatctaaagatggcttctccattttcgaaacatctaacaagtcctgttttaattgcgttaaatgttctggaagcatcatggaagtccatttgatcgcccctcgatctctaagcattttgaatcactcctttattgatctaatattaacagaacaaatgttctttattcaatataaataagaacaatagttcgatgtaattgttggaaatgactattcagcaagtatccactaagctttatgggctgctctagtcgatacttgagttcagtttcaagaaatccgcaggaaaaagtaaaaacagccgccagaagaaaatgcggctgtgtgtctttatttgtctttctcctttttttcattcggcagctggatggaaggcgtcacacctgatccgccgcttccgttataaaactgcggcacctctccttgaatcgctttaatggagaccggaatattatttgtcacgactgatgttttactggcaaacggaataatgaccttcactttaatttccacaaaaatactgatatcgatcagggcattgttaatgccgtacggctttatttttgttttcacatcagttaacgcatcaccgatcaggttaaagcgcacggggattttcggccccagatttccgagaatgctgtttcccgtgacctgccctaaagggatgttaatcataatttcatcggccgttttcgcgcctttttccgtttcatgctgcttattgttcgactccgcttccttcaaatgagcctgaagctgctttgtcactttcgccttcatactgttgaccatttgtgtattaaaatccatcgttgtgacttttccgttttcatccgttttcatatcgaccatatctttcacattgtcgctgtgagacatgtattcttcaatggattccgtaatgacctctgtcgccacccgtttggtttccatttctcctatgttcatcagcaccggtttgattgaggagttgatcatccagaggctgatgaccgtcgatatgataaaaaaagcaaacgacagaagcaacacataccgaaaaggcaaaggccctctcttgcgaagagcgctccggtatctaggcaagaaaaatccccccttacatatcacaatgtatgcttgtaagggggacatagtaatttattttcacacttaaaaactccggcacaaagtattgcttttctttctgatcacgcaaatgacgggctatttttatagcctgcttattttcgtttttctaatcctttttctttttatgctttcttttgaaattcccttataaatttgatgtgaattttccatttcattgcttagctcttttgtgttttcttccatcataggaattcttgtatttacaatcttagatagttcctggttaaattgtttcatcagtttagcttggtctttaagatttacggcaatgtcagtatatagttctatttcattaggatttaccccatcaatgacagctttagcataactcctagcagcttcatgtgggtctgcatatgtaatgcttgagccattatgaattagcaaaatttctttcttcatgataaatttcctctcttgttgaaaatcttaatatatcttataacacaaatttcaaaaagaaaagtactacattataacttgtctattgtcaataaggctccaataatcacagacatatatttggaattagtgtataatgattcctgtacattaaagcatgctcactcaagggagtcttgctcatcccctacgaaagggggtgatgcttatgtcaacatttcaggcattaatgttaatgcttgcattcgggtcgtttataatcgccctgttgacgtatataaataaaaaatagacctcccttgagcctggaaacctgaagggttaggcctatcatgaacaactgctgagcaagccctttgatgggcagctttttgtacagagccggggtgctaccaacaccctggtctttttattttatgcatttccacaaatcaaatgcaaaaaataattatataactgtatcatctacactaattataaccacataaaaatggtatttgcaatactattgctttatggattaaaccactttcactttgcctaaggacacttatgctgctacatcatgcaattgcaatacttttgcttaactgtttaataaatcatcatctagctcaatagataaaataccatcgtcttcatctgttgtctcttcaataaacagactttgaatgaagtcagagaaagaatttgcgaccaaaaatgtgtcttttattccatttgtcaattcatgatcccaaaaataaacttttcctgttgcttctcctttcacaccaagacaaatttgatctcctccgtcaccatcagcaatcggtataatccagtccggcatttgttctgaaagatcctcttttaatttgataatattagcatcattgttattaagaccgtagaaatatcccaaccggagattaccgttatctgctagtggattgtcctctaaaacagggaaaaacacattatcttcctctatccagcattccccgtataaattgagaaactctttatattcatctgttatgtcgaaagaattttcgtcctcaaactttttaaggacttgatgagaatttatgttcttatcaagtcttatatctaaataaaattcactcatttttttcttgattgcctgtatacccattaaaatcctcctcttaaatcagatgccgaacctacgtgaggtatattaccatgtaaatccatagggattaattggatggtgttattgtctaaatgatgcggtgttaatctaactacttctttcagccatttttcagcttctttttgggttttaaagcctttcattttttgaatacgtttataaactgctggaaaatcctttttagtacctttcagttctcctgatttaaacttaatcgtccctttgctccatggtgtaaaaaccggtctgccatctataaaagtgacgggttctcctttagtaactgcattaacgtcaggtctatctgagtgccatttaccgttaccaggagtcccttcccatctcccatgatttctaggcaaccttgttctaggattggcggactttattaactgaagcagacgatcctttaaattctcaccgttaactacattataaggaactcctccagccggaacaacatcgtaacgtggattataaggcaataaatcagcaattgagacatctttcagtttttggcctgctttactgactttagaggtgacttttcctgctacgtcagcttttgtaagagaaccggctccctttgtgcctactacagaggtaactaccgtacctatcgcatatgtcacccatcttgatctggagtaagcatctccatttaccatatctttttgatacgattcctcaatagctgttgaaatggaattatacgtgttaatcggatgagcaactgcccctatgataccttcaacaacttcatcaggcttgctgatcagctgccataaacctgttaccgtgtctttcccgacatcatataaaccaacgccggctccttttaaaatatcccaagtcacttctccggcttcttccatctgttttgcttgttcaagctgcatcacatattgttgttgggaaggttcaaggttttcatagccgatcttcttcgcgatttctaaatattcatccggatcggtcacaccgtcagcgagctttttcttcagatccttgatttcccgctctttcgcttcttcctttttaatcgtcaaataagcatccgaatgtcttgcaatctcgccttttttcttatgtatgtcactttctctgtacgccttggcgttatagtgaagtggtgttgcgtttttccctttacccgtggcattttgaagctgttgaaagtcggcttggatgaaatgctcgttcgcttcggtttctgcatattccttcgttagatcatgatcgagctttccgagcttgtgtatggtattgtcccgtttcttatctgctgaatccagcttttgatcgacatcctctgtagagaaaacatcaagatgaacaatatcacttatctcattaagaatatccctcatttcattccgttgctcttgcatgatggcttttgacttattcttcgcatgaatcaactcatgctctaaaaatgactcttccacaaacgaatcggctaatccggcatcagctacttttcctgaaatactgttaagaaaagcaatcttcatatcgatcagatcaagccagctgtctgtaacaccagcgtgatcttggaagaatgctttaatgttatcagcacctttacctgaaaactcgctgtcatctaaatcagccattccttgaaatgcttttctgagattgataaattgttctctaatctgatcgtattcttttgctcgcttttccgctgctgagattaacgaggatgcttcaaataccttcatatctgtctccttcccactcaatcttatctaaattttaccacataaaattacatgtaaggagagcttcttccttttgtcgaaggtctctttcttaggagatttgaactttaacaaaatcttaaaataggcttaattcagttgataaaaaatggaaaaggtgatactatcctcgcggaaggaggtattaattgtaaaatatattatttatttacatcttagatactcatagcaggtttaaacagaagaaaaaggagtgtaaaccattatgaagtatgtgtcaaaaagcatttggttagttgtaatagctctctctttattattctcttgctatcccctccatgatgtaaaggcaacggcaaacaaagaaatcactgataataatgcaactggcattgacctaaacaaacgtatctcaacagtaaacgaaaaaccgcaaaacaccgattcctctaaaagagaattagctggatcagaaagtaagttgcaaaaaattgctaaggaacaaggaatggatgttgaaagttcatatcagacttatatagcttatgacaaagatggtaatcagacatcatctggacaagtcacctctgaaaaccaacggaaaactgttgagaaaaaagcaaaaagtattatctatttcagtcacacttttttaggtggaaaagttaataaagtgatgcacggagttgaaatttcaaaaatagtagggattcctcctgcgtcagcagaagtacaccagggtttatgcaaaagtggttattataataaacagtttacttgcccccatactattagaaagacctttgtagggcctcaagtgaaaaagggatcggaagttcatcaatttattaatgtaaacaaaacaacattttggaagtatactggcggcgcaattgctacttgggcagggaaaaaaccaactgttagaacgatatcctggactgaaggattatacctaacgaatatgaagggaatgtttttcccctccaattacacagataagcaatcaggattaaatatattagctccacctaatgcatttattaaatgggtgcctagcgataaaagagtaaaatggggaactacagaacgcaaagcatataggaaatggtatgataaaaaatacggcaaaaaaacttgggtgaaatttgagattcatcatcaactacctagagagtacggtggaggaaatcagacaagcaatttaattcctatcgatgtgaattttcacaggaaagaagtaaatccatggtgggcttcttatacaaaaaagaagtaaaattgtagatgaacgtagatgaagactcctatgcggagtctttttattctgaaaccagtttataatactctcggatattcggattcacttcccaatatttcgttccattggaagaaactaacatatcaaaccatatttcaaaattcgaatctaagttaatcgcatcttcaatatcatcaattgagtctagatatagcatataacctaatccattttttgatttgtttgtgtctatgacatatcttccatcaaaatgatatccaattaaaacgtatccctctgggaaatcttgaacctcattatattcaatgattccctctaagctaagtatttcaatcccatcaaacatttccatcccattgtgctgtaacaaaaactctttatagtcattagggaaggtaacacctagcttctgttctatatcgctaatttcttgaggactagcaggatctttgaaatgaaaagtagcatcttccatgacataccctccatgatgaaacatagggaatgttccgtatttagaaacagcttcctttattccattaagagtcatttgaattaacttcccttcttccatataactttccctcctctaaggtttagaccactaaattttaccacacaactttatttgagtgttttaaaatgacaaaatcaaatttacaatctttggttttatatttataattaggaaggtttgtccgatatagagacagaacaaacaaatttgggggaattacattgaagaaatggttgttaggtattggcgcattatctctaagcttttctttggctgcatgtgggtctgattctgcttctacagataaaacagattcagataaggctaaaacaacgcaacaagaagaaaaggatacaaaagagacaaagacagactctcaatcaaacgacaaaagcaataatgacaagaatgaaaaagccgaaaatgcttcaaagaaggattcgtcggataaaaagacatctgacaataagaaaaagctagtcgatgtaacacttaacagaacggttgatggagacacgattaaagttaactataaaggcgaagtcaaaacagttcgttatttgcttgttgacactcctgaaactaagaaaccaaactcttgcgtacaaccatatggtgaggatgcttcagcaagaaataaacagctagttaacgagggcaagcttcaactggagtttgataaaggagatcgcacagataagtatggcagaatgttggcttacgtttacgcagatggcaaatcagtacaagaaacactgcttaaagaaggattagcacgagtagcttatgtatatgagccaaacacgaagtatttagacacgtataagaaagatgagcaagctgcgaaagataaagacttgaagatttggagtaagaatggatatgcgactgataaaggatttaatggctgcgcaacgaaaccgaagaaatcagtaagtgtatctaagccggttcaaaagtcagttacaacacaccaatccgagacacataaatcgaaccctagcaattcaaattcaagcagttcagcatcaagcagctcttctaactctgcacaagcctccccttctgctggaggaacagaacactttgcaaactgcacagagctgagaaagaaatacccgcatggcgtaccaagcactcaccctgcttatacatctaagatggatcgcgataatgacaactttgcatgtgagaagaattaatccatcggaagccctctgaggcttctttttttatttgggtatattctatctaaataaaaaccacagagctctgtgagggactctgtggtctatagtggctgttaaacccctatgatacatcaattaggatactttaaattagattaataagcaagctgatctaaaatgtttcgttaaaatgaggattttataaagaaattccaatgcacatgatataatctaactacacttacaataagaagaaaggatgaaatacttggcgttacacgaaaattcaagaatagcagtttattcaagaaaatccagagaagacagagattcagaagatacactcgccaaacatagaaatgagctagaatatctcataaaaagagagaactttaaaaatgttcagtggtttgaagaagttgtttcaggtgagactattgatgagcgaccaatgttctcattattattgccaagaatcgaaaatggtgagtttgatgcagtttgtgctgtagcaatggacaggctctctagggggtcacaaattgattcaggacgtatacttgaagcatttaagcagagtggaacattgtttattacaccaaaaaaaacctatgatttatcaattgaaggcgacgaaatgctttctgagtttgaatcaataattgctcgaagtgaatatagagcaataaaacgaagaacgattaacggaaagaaaaatgccacaagagaaggcagactgcattcagggtctgttccatacggttataagtgggacaagaatctcaaagctgcagtagttgttgaggaaaagaaaaaaatatatagaatgatgattaaatggttcttagaagaggaatattcttgcacagtaattgctgagatgttaaacgaactgaaagtcccttccccatccggccgttccatttggtacggagaagttgtttcagaaattctgtccaacgattttcataggggttatgtatggtttggtaaatacaagaaaagcaaaagcaacaacagtattgttcaaaataaaaatctagatgaagtattaattgcaaaaggtcatcatgaaaccatgaaaaccgatgaagaacatgccctaatcctgaatagaatagaaaaacttagaacatataaagtggctggaagacgtttaaatatgaatacccacaggctttctggtattgttagatgtccttattgtcataaagcacaagctatagaacaacccaaaggcagaagaaaacacgttagaaagtgtttacgaaaatctgctgaaagaacaaaagaatgcgaagaaacaaaaggaattcatgaagaagtattgttccagtcaattatgaaggaaataaaaaaatacaatgaagctctcttctcccctactgagcaagatgttaatgatgactcttatacaactcagcttattggtttaagagaaaaagctgttaaaaaggcaaagggaagaatagaacgcataaaggaaatgtacttagatggggacatcagtaaaacagagtacaaagaaaagctgaaaatttcacaagagacacttcaaaaagctgaaaatgatttagcagaattaattgcatctactgagtttcaaaatgctcttagcgctgagacaaaaaaagaaaaatggagtcatcataaagtgcaggagatgattgagtctactgaggggatgtctaactctgaaataaacttaatactaaagatgctcattagtcatgtaacgtatacggtcgaggatttgggagatggtacgaagaatttgaatatcaaggtctactataactaggtttatgtcgtactcaatcaataattcttacgacagatccggttacgacaggcggaaaaaaggatacgagcttgccgaagaaaaatgacagcagaatgacaagcagacccgatgccaaaatgcttccgtaaatggctgaaatcccgtactccttaccgatggaaataatcggcgctaccgcggtgaacgtacagccgagcacaacaggcaagccgatgccgaaacatttattcctccatacttgaagcagcgtagccgccccgcacataaaaatgtcaattgatacgagatatgtcagctgttctgcgttcagtcccagtgccgctcctacaattaaaggaacgacgacggcgccggcatacatggcaagcacatgctggataccgagggaaagtgttttggcatagccgtttttcatgaacggacctcctgtacaaatgtcacttttccgtcttcaagcgattgaattctcgccagtgattcgacccggaatcctttttttaccagctcgtctcttcccggctgaaatgacttttcaatgacgattccgatcccgcaaaccgctgcgcctgcttgttttacgatggacaaaagcccctctgccgcctgtccgttcgctaaaaagtcgtcaatgattaacacgcggtcttctttcgagagatgatttccggagattgcaatctgactttctgtttttttcgtgaaagaatagacggacgccgtcagcagatcatccgttaacgtgagagacttcctttttctcgcaaagatgacgggaacgccgagttcaaggccggccattaccgcaggggcaatgcccgaagattcaattgtgacgattttggttatctcgtctttttcaaaacgccgcgcaaattcccggccgatctgctgcatgagaaccggatcaatttgatggtttaaaaaagaatccactttcagcacttgatcagaaagaacgattccgtcttctgctatttttcgttttaatgcttccacaatgattacccccgcttataaaaaataaaaaaagcattgcccgctctccaaaaaaagagcaagcaatgccgaatgatctacacgtaacggccgaataaagccgttccattgctcactcatagtcggacatttacggtgaccggtagaaacttgcgtgccatatccacgcgattatatgagtgttcgtatgatattaatcaaattataacaagatacacttcttttgcatagtgaaatttgaatatttccgaacttttacaaagaattagttttcgattattcgtctttttagaatttttagaaaaacacccggtgtatgccgggcgtttcgtttataaatataaatttgaatatttgccgacgagatactcaatgagatattgaacgtttaattcttctcccgttgcatcttttatgatgtcaagcggcattttgcgtcttccgtgctgatgaaccttttctgtcagccattgtttgatcggctcaaagtcgccccgttctattaattgatcaaattcaggcagatcctcaagcatggtatgcttcagctgtgccgcatacatatatccgagcgcataggaagggaaatagccgaaatcgccgcccgcccaatgtacgtcctgcaaaatgccttttgcgtcagatggcggcgtaatgcctaaataatcatgatatttttgattccacaatgcaggcagttcttccactgtcacttcattgctgaaaatcgctttttcaatttcataacggataataatatgaagcggatatgtcagctcatcggcttcaattcggataaaggtcggtttcgcctcatttacggcgcgtacaaagtcctctcttttcacatcttgaaattgatcaggcgaagcctcaaccattttttcataataggcggtccagaaatgttgatttctggcgataaagttttcataaaataacgattgggattcatgaattcccatggatgcaccgtcagataagttcgttccgctcagcgcttcgtcaatattctgctcgtagatcgcatgcccgcattcatgaatcgttccgaaaatcgccgtgcggaaatcgttttcgtcatatctggtcgtcacccgcacatcgccgcggttgattgtcgtcgcaaacggatgcaccgtctcgtccaggcggccgccgtcaaaatcatacccgaactcttttaagaaatacaaggagaggtctctttgttgttctttcggaaacgttttcgttataaaggaagtgtccggtttattgccggattccgtcacttttttgataagcggaatgatcgcttccttcaattcagaaaacagctgatccagcacctttaccgtaacacccggttcgaaaatatcgagcaatgcgttgtatggatgatcttcatagccccagtaagaaataaaccgcttattaaaatcaatcagcttctcaaggtacggagcaaacatagagaaatcagaggccgcctttgcatcctcccaagccgtttccgctttcgatgttaaaatgacatattctttatactcatcttcaggaatttttttattatgatcataatcttttttcgcaagttccgccgctttcactgtatcttcagagagctcttctgcatgcacgagaaggatgtcgatcagctctttcatccggtcggatgtctggatttgaaaaacgtcagccgacagctgtccgatgctttccgcccggtcatcagagccttttttcggggctcccgttcttaagtcccaatgcatgagcgcaatagcttcttcatagtgggatactctttttaacagattaaaaaactctttttcatatgtatgtacatccatatccgttcccctcccttttcactatcaattacaggctaatggaacgccgttataaagtcaacttcccggattaaaaaaagccgcaggataagattcctgcagctcttgtttttatacgattttcggtgtaacaggcaagacctttttgacttcggccaggacccgttcactttctccgcccgcataaatggatatggttccgctgtcctgattagaacggatgaggcggccgattccctgccggactctcaaaagcatgtacggcagatcaacttcctcaaacggatcttttttcgctccgttccgctttgcggtaaacacaggatcatgaggcggatacggcaatgcccaaatggtcacattccggagcgagtcaccgggaatgtcaagaccttcccataagtggacggaacaaagcacggattcttcatcccgctggaatttttcgaccagactgctgatctcttcgtcaccttcgtagtaaatcggatacggcagctcccacgcggcagcctgttctttaaattccttcatgtcttcaaaggaagggaaaagaacgagggtgcgtccttcattctccttaatggtttcaatcgtttcgactgttttctgctcagacgtcatgtcaccgtgaagcgcaacagacatttgctcctcgtaatcgtacggagattcaacggtaaatgataaaggatcacggattccgagactgtcagcgatataatcaaatgaaccgccctcagaaagagtggccgatgagaagatataaggtatctttttagaaaagaccttttctcccaaaacttcggctacagttctcggcataacgacaaacgttgagtctgtatcccgcgtttcaagccagctgatggcatccttttgatacagcgacagcgaatatgccatttgttcgacgtattcttctacaactgacagctcgtacttatcaatcgtatacatttccgattcaaatacgagcgcctcgccgattttatcgagcagacggcacagttcgtcagccgcacgcttaacacgctggtcgttttggatgtccaatcggtgagagccggcgatttccttcgattcctctgacagcacatagaaaaactcatcgtttgcggcaagggcatcttcaatcagttcggcgaattcctctctgatgtcattttgaagcagacgctctaaaaacagctcaagcgtcgactgcttcacacgatacgttaacgctttttgcgcggcgaattccagcagatgtccttcatcaaacacgacggcgctgtgatccggcaaaagcggcagctgcccttcccttttgcgtgattcttccgtccatacatgctccatgtagaaatcatgggagcaaacaatcagatccgttgattttctgtaatgatctcttgaaagtgttaaaccgcatctatgtctcatatcacatgttaaacaatcttggaaggaatcatagctgacgcctgcccactcttcatttgtcaaatcagcgtactgtttgcggtcgccgtacggataaaagcgctgcatcgcttgtgattcgtgtacgaatgaaggcagcgactcataaagatccagccacttttcatcatcagaacgctgcatcgttttctccagctttttcagacagagatactgctcatgggatttggacagccgtgtatcaatctgcagatccaaatgttctgtcagcttggaaatgtcgccttcttttttgacaagctgttcaattaacgtttcatcggcgcatgcgataatggccggtttacccgtatatcttgcatagctgatggcaaacagcagatacaccagcgttttccccgtaccgactcctgcctcagcgaacatgacctttttctctttaaatgcccgttcaagctgaaacgccataaatacctgctcatcccgaaggtcaaagcctttctcgggaaggatatcgtaaaacacgtcaccaatccaattgttcaattcttcgtaaaaattcttttcttttgttaaagcaaaaggcaaacgtgatgttgtcacccaactccaacccctaactattcggcattcagaccatctataatatcatttaacccttttcaatacaacaaaaaaacttggcctcgccaagtttttgtcattatcatttccggttaatgatatgtgtacataggaacggatggtctgttgaatgtgtatgttttaccgcattttcaagttcttcctgtgcgtgtgtcatgacggaaggaccgaacttagctccggcttcctccagccggaaagcagttgcgtctaacgccttttgtattttactgaagtgctcgctgttcagcataaaataagatcacctctcaaatagaaataatcatcattctatgccgatgcttcactttctatacatgccatcctgaatgatccgcacctgacctgcacaaactacaacagatattcgatcgaatatccatcttcacaaaattattctatccgggagtgatggttacatgagttataaagatcgattagatcagcattctgaattgtttcatcacaattggacgcggccgaaacgctctaaatcgcaggtgaacggccacaccgaaatgtcccagaccaacattattttacggagcaacgcaaaagcgcaccgctggtaatggcagaataaaacgtaaagatgccggagaagacgctgtatcaggcgtcttctctttgttgcggctttttccgctgcggccgcactttagcccagtactgataataatccgttttgataaaaccgttaaagagcttccgtttttttgttgcttttcttccgtagacctcttcaaattgttcatttgacgttaacatgtagacagaccatgtatcaagagattcaaatgcccggcccatttctttatacatctgctcgacttgctttttttcgccgagccgttcgccgtacggagggtttccgacgataacgccgaattcgagtttcgtcgtaaaatcctgcactcgcatctgcttgcattcgatcaggtccccaagtcccgcttcttctgcgttttctttggcgatgtttaccatccggtgatccacgtcactggcaaaaatctgcagcggctgatcatagttcgccttttcttccacttcaaggcgcgccttgtcccacagttcttttccgatccattcccagtcttctgaagcaaaatcacggttaaaacccggagcaatgttttgcccgattaaagcggcttcgatggcgatcgtgccggaaccgcagaacggatcgacgaacggacggtcaggcgtccagttggttaacagaattaacgcggcagcgagcgtctctttaatcggagctccgccctgatcaaccctgtatccccgtttgtgaaggcctgttcctgatgaatccagtgtaagtacggctttatcttttaaaagggaaatctccaccttatactcgggtcccgtttcttcaatccattcattttgttttcctgattgaagtttcagctttcccgctatcgcctttttgacgatccgctggcagtcaggcacactggcaagcactgatttcacggactttccgataacggggaactttgcgttttctggaatgtacgcgcgccagtcaatcgcttttgttttttcaaacagctcatcaaacgtttttgcctgaaactcggcgacctgtactttgatgcggtcagccgtccgcagccataagttagcgcggcagatcgcaagcgcatctccttcaaaaatgacttttccgttgtctactttgcattcataacctaaatcacgcacttctttggcgacgatcgcttcaattcccatcggcgccgtcgctattagtgtgtacttcttcatcgtatcaccctgtctcttttaagctttcgtttcattcaagataaaagctcccctttaaaggagagctctaatttgtcatatcaataatgtttaacgttctgtaagccatgttttgttccgtcgtactgcaatcggctcatcacctcgtactcaggcggcaatcatctatctacagaaagtattctgtccttctatctgttcagttccttcaagaaggttcccctaccaaaatttgggtttctcgctcgaggggtttaccgcgttccactctcaacatttctgatgagacttcgtcactgtggcactttcaaggatactcagccatatccggagacgtaggcttttttcctgccgtcagcctatcaaggctgccctagcttatttcttcgctaggcacgaacactacgggcatctcagcaccgtgcgagcatggactttcctctacagattcaaagacctgcagcgattacccgaacgttaagaacacttgttcattataaagcaacttgtctcatttgacaagtgcatctgccttattcgtcataaagtttgctgccgaatacatgtttctcaaggttggacagccttttcagaatatcaaagttggtcgtattggactgcaccggctgttttttgctagcttcttcaagctgttttttcagctgcagattttcctgctgcagttcttcaatttcttgatgaaaggtttcataatccttaataatcatatctaaaaatttgtcaacgtcttcttgtctgtaacctctaacgcctgttttaaattctttttccaaaatgtctttcgcagaaagctttactttatcagcaagcatctttttcacctcatatcgtgaatcatcatgttatattttattcagaaacacgtcccgttgtcaaatattctctgacgtgttatgtaaagaaatcttcttcctcaacggcggcacggagatcatccatcgtaatcgaataaatcggatatccgtctgtttcacggcgtttttctgcctgctgcagcatatatttcggcgatccttccacctccggatcatataaaagcaaaagcgcatctgacttttcaataaagaacgcgtttttctgccggaattggagcggactttcgtacggccgatgcgtcaggctctcctcataatctgcctgagcaagcaccgcttcatacatttctttattcggctccttccacttttcctcctggccgtagaaaggcgtgataacggcaacctttaattccggatactcttctctgagatcgtacgccgtttctgccgcccaaagctcagtccccagctgtccggatatgagaatccattccaagccttcgtcaataaagcttctgagtctggtttctatcgccttttttatataaacaagcgcccggtcatcctgtttaaagataccgagctcaaacggcttgtaccccgttacggctaatactttcaattaatcacctgcttaaaaaatggggctccccatcgggccccattttgatttgctgatatcctaaccgatcttgcttaagcgttcaatactaatgatcgcagcaagggcttccgcactgaaaatgctggtgagttgtcgggtcaacatttgaaaaagtgtgcggatagtaatgaacgtgctcaaagttgtggtgatttacgttagttgtatgttgcggatgaatatgcggcacaaccgtgttagaaaagcaatggtgttcacagcaatgagtcggatggacaatcggcggcatcacgtttggtctgcaacaatgatgatgaaacatgctaaatcccctctccattaacttttattacactgttaggttatgaagaaaagagggtgcatgttctaattcaatcacccaatttaaaagtgtgtcagcaaactgtctttaaaattcgaaaatacaaacgcaatcaaaaaaaccacgacaaagaacaagtaaaaaacacctttatacataccaactctcccctataaataactaacgctattttacaagatgcggcaccattctacaacaaaatcgatgcggattcagaaaaaaatatttttggcgaaacagctcggcttttgcgctttcccgggcaatatttcaagaggaatatttcctcttgagccgggcaattctcacatggagcttctcggcttctttttccgatatttccccgtcttctgccgcctgctgcgcggcctgcagagcttttttgtaatcttttgcatggtgctcaaaatagatcgccagctcaaccgctgattggtgtctgcatgtgtgaagatcagagtccgtcagtttctcccaaaggggcacggcgtcttgcctgcggttttgttttttataaagcatcgctaagtcaaaaagggcccgatccgaatcttcaaagtctttgccttgcagcgcttccagctgcaaaacggcgcgatcggtttctttatgagcgataaaccatttcgccatggcgtatgcttcctgacgttctgacgtctgatcagaagatgcaaaaatcttttttgacatatggatgtaaagagcgatgagggaaagcacatcttgttcattatgcgagagcactccctttaaaagagccgggtcctccgcctttaaaaattgaaaatacagcatcggcgccaaataaccaggggtgtcttcgtcccttttaaaagcaagctcttcattttcaaccgccgaaagcgatacacgctctaatttatgtttccaaagccgtctcgccccgtgcagaagatcaaagtgcccgaagtcaggaagtttcggaagcctgtcccgcagcaatgtatgcctggtttttacctgcggccagtcaaaggcttttccgttatacgtaacaagggacgtaatgtcaacctcacttaaaaagcttttgtaaagagctgtctcgtttcccggtttagggagcagatgctgtttaaccgcgacacggtcttcatacactcttgcatggccgagcaaaaagatcatattgcctgccccgccgccgaggccggtcgtttcagtatcaaagaagaacagctggcttttttcgtatccttctgctgataaagtatgtgtcaaaccgcctttattccataatgccatgacgtcatcaagttcactgaagctgtaccgtccgtggcggtgcgaaagcggatagacggtttcgcggataagacagtattcatcctcaaaaaagaaaggcttcactccgaatgcctcccattcttctctaaacgggacttgaatatccgggaccgaaagttgtgaagctgccggctttttttcagcttccggcacattcaggtggtttttcatccgctttaatttatttttcaaggacatctttcgtcccccttttcttttacacgtaattcaagagccggagtatcgctttctttgcatctattccttctatttcggagccgatgcaggaaggacacccgtcttgacatggacattgtcggatcaggcgctcagccccttcattgatttcatcaaatcgtttatatacttcatcggcaagtccgattccgcccggataatgatcatacagaaagattgtcggaagtcccgtatgtgcggctttgatttgcggcacgacatgcacgtcatttcgatcgcacatgacgtatacaggcacgatatgctgcaggacgtgggcaatgcctaaaagcagctgttcaagcgttttttcgccgatttccgaatccgtttcttttaattcaagccagactgcactggtatgcagttcttcttcaggaagatgaatcggtcctgatcctatattttcaaatgtcgtcattttaatttttttaaatattgtcggaagtgcgttcacggtgacgtcgccgaaatgtaaggccgttttctttctgctgtccgttctgtcaatgtccagcactttcagctgcaccgctaaattggcatctgtataatattcgacatcgacctttcgcacgtacgcttttttatgttcccaatcaagcttttcaacctgatactgcaccccttcatgaagataaatcgcttcatcatgaagaagcgtcatcgcgctgaagcggtccatttctccgatgatttttacatcagccgtctctgaccggtcaacgatgaccacgttttcctgtgacgccgaacggagactgatattggaggcgggaaaagattcgctcgcccagtgatagcgttcgcggttttcgtgaagcaccccttcttcctctaaatactcgagaatgtccctcgcatcattttctccgaatgtttcatcggctctgaaaggcagctcatatgcggcgcatttcaggtggtcgaccaatataatgagattatcgggattaatccttgcagattcaggcgagcgtttaaagaaataatcaggatggcgcacaatatattggtcaatcggatcagagttcgccaccatcacgataagcgcctctccctgccgccgtccggcccggcccgcctgctgccatgcgctcgcgacactgcccgggtaccccgtcatcacgcagacctgaagctggccgatatcaacgccgagctccagtgcgtttgtgctgacaacgccgagaatgctgccgtctcttaacccccgctctatttctcttctttctttcggtagatatccgccgcgatagcctctgacagacttcgcgccgatttctttttttacgatctcctgaatgtggcttaaaataatttcgacccggacacggcttctggcaaaaacaatcgtctggatcttattttttaaaaaagttttggcaagttcgttcacttccacggtggcgctttttcgaatatgcagcggtttatttacaatcggaggattgtaaaaagcaaagtgctttcttcctgccggggcaccgttgtcgtcaatcaggcgcacagattttcccgtcagctgctccgccaactccctcggattggcgattgtggcggatgtacagataaatgacggcttgcttccgtaaaaagcgcagattctcattaaacggcggatgacgttcgccacatggctgccgaatacaccgcggtacgtatgtaattcatcaatgacgatatatttcaggttttcaaacagactcacccattttgtatgatggggaagaatggctgaatgaagcatatcgggatttgtgatcacaatatgcccggcctttctgactttctgcctgatagccggagacgtatctccgtcataggtgaagcttttaatatccatgcccgtctcgtctatgatttcattcagctcgcttttttgatcctgcgcgagcgcctttgtcggaaataaataaagtgcgcggcttgtggcatcttccgcgatagactgaagaaccggaagattatagcacagtgtttttccggaggccgtcggtgtgacggccacaatgctttctccgttttgaaccgtctgaaaagcggagtattgatgtgtaaaaagccgctcgatccccctcttttcgagagccgcccgaatgttcggatctacttgctccggcatcggcatcgttttcgcctcccgcggttcctcttcatgccaatgcacaatattttcatgattttttaattcctgaatcagttcgctcagtgattttttcttcatcgttcacacctctttatgaggtacagtttaccgaatatttgtttgcctggctagatgaaaatcctgcacaagaaaaaaagcagggaatcagcccctgcctacttcatttttatcgtaaaaagctctgtttgtccttttttcgcttcatttgcgcctgcaaattgcaaaggttctgcggcatcgccattcataatcaccatagggatgacggtgctgcttgctttttcttttattaaatccagccggcacgttaaaagcagatcgcctgttttcactttgtctccttcttttacatgcgcttcaaagccttcgccgttcatattgacggtatccaaaccgacatgtatcaaaagttccgctccggaaagggtgcggatgccgacagcgtgttttgtatggaacagctgaatcacttctccctcaaccggtgaaacaatttctccgtttgcaggctcgacggcgatcccgtcccccatcattttttgtgaaaatacaggatccggcactgaagccaaatccatcaccgctccgtcagccggagaaaaaatcacttcctcggccggctttttccggctgtctcccaatccgaataattttttcagcaatgtgttgtgctccccttcctaaatgtgaatccgttaccagtttattctccactatttaaccatactttcttttttccttcaattcttaaccatacggcatagcatcgcatagtctgtttgtaaaaaggcggtggtcatatggatcaatcccaaaacgataaacttgatccgcaaagtaatgaggacatcatcagccatgcgatggaccaattttttcactcaggtcccttcgcagaattgatgcagggttttcagcaccttgtcaattcggcttttactgaagcgcaagtgacgattgacgtcagagaagagccgacggggctcgcggttgatatcggcgttcccgagacgttccgtgacggggatatgctggtggaaacgaaagggtgctaccttcacgttacaatccgctacgatcataaacaggctcaatcatcccatgtgtcttcaagcatgacaagaaccgttgtcctcccgtataaggtaagtgaagaagatatggaaacatcctggaatgaacagacgcttaccttctttttccctaaaaaataagcatgaatgatggatatcattcatgctttttatttgaagatactggtgaagcctttcaccagcgatccgacctgatttacggcgcttaccatctgccccgttgtatccatcattttattaaagtcaaactgtccgttcgtttttttaaactgggagagtatgcctgagaattgggaagactgctgctgattcggtctgggaacggggtaaggattcacaaaccccggctggcccccgggcatgcctgcctgaggaggagcaggagcaaacggctgctgtatatgaccgtattcctgattcggataaaattgctgcgggtactgcccttgctgatgatatggcggctgttgcaatggctgtatctgctgcggatacggcggctgtaatggctgtatctgctgcgggtagaaatatcccgccggctgctggtacatattttgatatggctgcgctctccattgcatatgacattccccccttgtctctcactaagtttctgctatatatgtatgaattccgccttggttatgtgctttcggtgattctgctctttgtcaaatgctgtcgaaagtcttaattttttaaaaacagaaaaaagtcgaatcgttatgttaacataatctcaacatacatgagaggggatgcaccattatgaacgtatcatacttaagaaagcgttttgctgaagtgaaaaaatatgaaacagattgtgcagataaactgatggactttgcaaaattcctctatattcaaggccatctcaccgcaaccgaatttcgaaacagtatgaaggttctcgaagcaagtggagcagaaaacccggcgtatgaataacatacccgacccctttatataaaagaaggcagccgttttcagctgccttctttttcaatttcatcccttaatatacgaagcgtatataaaacagattcagttaaatccctgtatctttttttatgaatatgatgaacatatgattggagcatcagctccccgaaattttctgtaacggcctgaatttgtgcatgatgaacgtatttcggacggttttcctgaataaacgcaagcgctgcttctgtccaaagcgcgcaaagccggtctcttttttcaacatcgggtttaatcgtctcaaaaaaatcatatgaacggcctgactcttttccatcctgataccttttttcggcttccagaaccgcctctatcatttgttctgtcagctccaataacgactgtgtctgcaaacggactcacctcagtacatatggtaccaaagtttttgcacaaaatcagcttatccggcagactcgcggcaaatcctttttacgccggtcagtcaaaaacaggtcatcaatacaaacatgaagctcccgcgcctcttcctcaagacgggaaagtttctcctgtctgatttcttcagcttccgcctgacagcatctgactgcttgggtaagcgttttttcagcagcagaaatccggatttcgatatcagaaagcagacggagaatatcagccttgctcgtgtaaacagacattcatgttcctcccttttatcacttgcatctctttcaaatataattctcgttttcataccgctctcctctgcacatgacaaaactagaagcagttcggcaaacaaacagagattatcctaaaaggcgtgcctttcgacaaaaaagtgccgcaaactttgtatgaaccggcacgttaatgcaaacgatacagttgaggaggtgccgtatgaaaacgagaccgaaaaatgcaggtaaacagcaaaaaaccgaagcaaaaacgactgatacgcttgataaaaaattaggcggcccaaaccgcccttccacgtaacacatcagcagcccgaaaccccagcgaacggtttcgggctttttcatttcttcagccactctttaaccgcgaagagcgcatggagctcccgtcttttctggaagtaccagtccgtcagttcaagctgtttcggcattttctcctgtaagaaagccccttttcttaaccttttttgaaaccaatccgccctttcgccgtctaatgggtgggcaacaatgggataggttgtcctaagcatcggtgatgttctttttttgatgccgatcattttctccatatcaaagcgtgaaccggtatgaggaacggtatcaagaaaacggtaaaaagaagcgtgaagatcagggctgaacagaaggcgggccagctgttttccgagcgtaattctctcttcggtttttgaaaaccgtttgacggaaattccgtataaatgtccgtcaaatgaagggaatatcaccgtattaaagtgaaaccaatcacttaaataaaaaggaatcgtgccaaaaacattctttttaaacgaaggattttgtataataggtgcttggatagtgttttgttcatttataataagagcatacatgagccgttccgtatctccgtcacgccaaaagcggaaccattcttcctgcataaaagccgagacgcggaaataaggaagatgacggaaaagaggttcgccgatttgttttgaccactggtagaccagaagctgaggataggcatcagaaaaaatcagccaattcgccctttcatacgaaaggaaaaaccagtttttctgactgctgtcaaggccctcctgataaaggacgcctcttaaatcagtcatcgaccagcccgcattgcgggacacaaaggatgccaaaagcggccacttgatctcaggatggcggtcataatatgctttataggcattcgtccgggaaatattatcggcattttttattttcgtctctttttcgatcaggcgaagaatggcggttacggtctgtcgtttatgcacgttcattcacttccgtcactattagtttgataaggaggatggaaaaagtgattcggtacccgaatggaaaaacttttcagccgaacaaaacggtttcatcccaaaacagccagaaacggtctcattcatacagtaatcgcggcatgaccctcgaagacgacctgaatgaaacgaataagtattatctggctaaccaaattgctgtcattcacaaaaagccgacacccgtccagattgtaaacgtccactatccgaaaagaagcgccgcagtcattaaggaagcttattttaaacagtcttcaacaactgactacaacggcatttataaaggacgctacatcgatttcgaggcaaaagaaacaaaaaacaaaacggcatttcccctgcagaattttcatgatcatcagattgagcatatgaagcaggtggtcaggcaagacggcatttgttttgttattatatccgctttcggaaaggtttatttcctcgaagccgacaagctgtttgtcttttgggagagaaaggagaagaacggcagaaaatcaattcgcaaagacgaattagaagatgcttcctttccgatttcccttggatactcaccgagaattgattatattagtattattgaacagctttatttttcgcaggaacagtagactgagcgaaaggttgataaacgaaaggttgagatgttatgtcagatcaatttacgagccgtgaagaacgccgtaaggcaaggcagacgaaaagcactaagccctcttcaccgaaaaaaggcaagaaacagcgtaaaggcggtttattcaaaaagattgtgctgtccttggttattctgtttgtccttggcatagtcggcggagcggcggcatttgccgttttggtttccggcgcgccgtctttggacgaagccaagctgaaaacgccttactcttcaacgatttacgataaaaacggaaaagaaatcgcggaagtgggcggtgaaaaacgaacctacgtcccgattaaggatatacccgatgttgtgaaagaagcatttatcgcaactgaagacgcccgtttttataagcaccacggtatagacccgattcgtatcggaggcgctttggtcgccaactttacggatgggttcggttcagagggaggaagcacaatcacccagcaggttgtgaaaaactcgcttttgacccatcagaaaacgattaaacggaaagcacaggaagtgtggctttccctgcagctggagcgccattattctaaagatgaaatcttagaaatgtatttaaacagaatttatttctcaccgcgcgcctacggcgtcggaaaagcggctgaagaattcttcggcgtaaaagacttgagcaagcttacggttgaacaggcggcaacgcttgccggaatgccgcaaagcccgaccggatataacccggttaaaaacccgaaggcttccgaaaaacgacgaaacatcgttctcagcttaatggaaaaacaaggattcatttcaaactctgaataccaaaaagcgaagaaagtgtccatgaaagatgaaggcgtcgtcagccaaaaggaatacgataaaaaggacacaaataaatacagcgcttttgtcgaagaagttatgaaagaaattgagacaaaagaaaagaaagacgtcgatatttcaactgacggactgaaaatttacacgactcttgatacgaaagcacaagattatcttgatcaattgatgaacggcgatacagccggatttaccgaaggcatgcagggcggcgtcacgctccttgatacgacaaacggagaaatccgcgccatcggggcaggacggaacagaactaccgggggattcaattatgcaacacaaggtaaaacccagcccggttcgacgataaaaccgattcttgattacggaccggtcattgaaaataaaaaatggtcgacgtatgaacagattgacgactcagcttatacgtactctgacggcacaccgattcatgattgggacaataaatacagaggccagatatcaatgcgagaggccctcgcagactcacgtaatattcctgctttaaaagcataccaagcagcaggaaaagatcatgccgtcgacttcgcaaacgacttaggattgggattaaacaaagatcaagtatatgaaccctactctatcgggggatttggtgagggtaaccgcggtgtatctactatgaccatggcaggcgcctacagtgcgttcggaaataacggaacgtacaacgaaccgcacgcggtcacatcgattgaatttaatgacggcactaagcttgatttaacaccgaaaccgaaaagtgctatgagcgactacacagcgtttatgattacagatatgctcaaatcagctgtcgaatcaggaacaggtaaactggctcaggtggcgaacgtggaagtcgccggtaaaacgggtacgaccaactttactaaagaggacattcaaaaatataacattgctccaggcggagtcccagactcatggtttgtcggatacacccctcaatatacagcggcggtttggaccggagttgagtctggcaacaaagcaggcaagaaatcactgtcttctgcagaccagcaagtcgcaaaacggattttccaaaagctgatctcatacgttgatgacggtaaaggaagcttcaagcagcctgacagcgttgtaaaagaaacagttgagaaaggctcgaatcctgccgctttagccggaccgaatacgccggatgataaaaaagtgacggagtacttcgtgaaaggaacgcagccaactgccgtttctaaaacgtacacgaaagaaaaagccgataaaccgacaggattgcaagtgaaatacgacaaagataaaaaatcattaaccttaagctgggattatgacggtgatgcaacattcaatgtcaaacaatccgttgacggcggaagctacagtgacattcaaaacagttcggcaaaagaagccgtcgtctcaaatgtcacgccaggctccacatacagcttccaggtgacagcggaaaacgatgacggaaaaagcgatacggcatcagcatctttcaaagtcccgaaagatgaagaagacgatgcggataaagataaagcgactgacgatgaacagaagactgatgaagataaagataaggacaagacgcaaaccgatgattcaaacaaagatgacgatcagacagatacgtctgacggatcggatcaaacaccaactgatgacccggataaaaatcaggatcaatccgataaggatcaaacagataacaacaatcagaatcagcccggcaacgggaccgataacaacggacagcaagataacggctctgataatgattccgattccggttcagacggctcaaataaacctgacagcggtcaaacggataaaaaccaagactcatcttcaactatcaacgggcagtccaattcgtcaaccatccagtcaaatcccgctcattagcggacgaaatccttcaccccaaacaggtgaaggatttttttcgtacaaaaaacctccttatgggaaaaggaggtttttaacatttgttcatggcttcatatttatgatattgtttcttcatctccgtcatcaattcatccagctgaataaacgagtgatattgagtcggttttgttaaaataaacgccattcgctccgcccaattgatcggttccgcgggaaaatgctttgtttcaagcacagtccagtcgagtgatgtgacccgctcccctgccgtccaatgaaaagcggcaatcagacaggctattcccttcagcatgtcattttgatcacacctcgattttcttgtttgaaaaacgggaagcagcgtttctttcgtttcattccaaatctgaaaaagaaacgggacatattcgcccctttccctccatggctgcactgttggctggccgctgaaatccatatacagcggatggcggcgcagcgccgctttgatctcgaggctttccaagtccgtaaggctgcgcaggtatgtttcatagcctgccagaatgtcaatcgccgtcaccgtttcaccagcccttttttgtcacgcttctgcccttctctgcatagcggaagcaaaggacattccgcacagcggggagattgcgctttacagtgataccggccgaaaaatattaatctgtgatgcgtaacagaccaatcctctttcggcacttttttcattaatgttttctctacttccaaaacagagtccttccagcggcagatgccgagccgtttagagacccgctccacatgagtgtctactgcgatcgcaggtacgccgaaagcaacagacacgaccacatttgccgttttccgtccgacacccggcagcttcacaagctcatcccggtctttcggcacttctccgccgtactcttcaatgatcattttgctcagcttttgaatatttttggctttattacggtacagaccgattgatttaatatcctgctggagttcttccagcgatacggcaagataatcttcaggccgtttatatttttgaaatagcgtttttgtcactctgttgacgagagcgtccgtacattgcgcggataatgcgactgccacaaccaattcgaaaggatttgaatggacaagttcacattctgcgtgcggaaacatatcgccgattttttcaagacaatattcaatctgctttaaatttaacacgtttctccccttctcatgttattgttccagccaattgtaaaaaggtacctgcctcgtatactctttttgcggatcattctgtttcgtttgaacacgccggaatttttggctgtgcgccttcgcctgctcaaccgttttgaagccattctttttccattcaaataaaatccggtcaatatagcgaaaactgagtttccccgataaaacggcttcttttaaggcgtgtttaatcagaatcgcatcatgctgatcctgatcctgccatatggccagcgtctcgcattcaagcggcgacagcggtcttccgaactcttcttcaaagatggtatacaggcttttttgttctctttctgacgttctttcctgcgtttcattttgagaatgctgcatgtaatcatacagcttcgcccataacggctgcagagaatatttttcaaactttatgccgttatggtcttcacattcttcaataaacagaaaacctttttgaataaacattctcaggcagcttgtacactcttcagcagagatggacatgcctgattgaagttcaaacggcgtcggaaaataagagcccttttccaaatgcattttaatcttcaaaagcaggatcaattcggtttcattcagcccgagctgccggtaatgtgtcagcagcaggttgggaatgcttgaaatgccgagttcctgcatatctataaattgctgttttttcatccttacacctcttactgtaaaaggttatctccgggagctttcccctttacttagaaaaagtctcccttgcaggagacttcgtttttcataactattacggatacagacggttcagaagtctcgggaacggaatcgtttcacgcacgtgaggcgctccgctgatccaagccactgtccgctcaagtccgagaccgaagccggagtgcggaacagaaccgtattgtctgagttcagcataccatttgtaagcatctgaatccagaccgtgttcttttaatctttcttccaataaatccatatcatgaacgcgttctgaaccgccgatgatttccccgtagccttccggagcgattaagtcggcacataacacgacatcgtcacgatctttggcaggctgcatatagaacggttttaatgacgtcgggtaatgagtgataaacaccggtttgtcatagctttctgcgatcgctgtttcatgcggcgcaccgaagtcatctccccactcaatatcgtcaaagcctttttctttcaggaattcaatcgctttatcgtacgtaatgcgcgggaatggcgctttgatttgttcaagcttcgatgtgtctcttcctaatgtgttcagctcgatcttacaatgttccagcacactttgtacgatgtatgcaacataattctcctgaacttcaaggttttcttcaaattcaacaaatgccatttcaggctcaatcatccagaattcgatgagatggcgtttcgttttcgatttttccgctctgaacgtcggtccgaaagagaatacttttccgagcgccattgcagctgcttccatatacagctggccgctttgagacaagaaggcgtcttcatcaaaatatttcgtcgcgaacagctcagtcgtgccttcgggagcgcttcccgtcaaaatcggcggatcaactttcacgaagccttctttgttgaaaaattcataagtcgcacggatgatttcgttacggattttcataatcgcgtgctggcgtttcgaacggagccataaatgtctgtgatccattaagaattccgtaccgtgctctttaggcgtaatcggataatcagtcgcttcgtgaatgacttcaatggatgtaacagcaagctcatagccaagcggtgaacgctcgtcctctttcacaattccttttacataaagtgacgtttcctgcgtcactgatttcgcaatttggaagatgtcttcttctacttcagctttgacgacaactccctgaatgaagccggtaccgtctctcagctgtaaaaatgcgattttaccgcttgagcgtttattagcgacccaagctccaatcgttacttcctcgcctgtgtgtttatacacttggttgattgttgttttcaaactctttccctccagaacaagaaagacattcaggaatctgcctgaatctcttttttcatcactttattatacccgttctactctaacggggtcaatgcaagtgaaaagcggctttaaaagccgctttttcagaatcagctgtgtttttccgtaaagcggcggattctcttgaccgcttcttctaaaagatcgagtgacgttgcgtaagataagcggacgttgtccggtgaaccgaaacccgagcccggcacgatggcgactttttcttcttccagaagcgccttgacgtattcatcgacatctttgaatccgcagttttctgcggccgctttggcgttagggaacaagtaaaacgccccttcaggtttgacacaggtgaatccgggaatctcactgagctgagcgtaaatggtattcagtctgtcctcaaatgcctgtctcatctcttcaagcggctcagccggcccgttataggccgcaatggcgccgtattgagcgatggacgtcggattggatgtgctgtggctcgcaaggctcgtcatcgctttaataatcgtctccgaacccgccgcatagccgatcctccagcccgtcatgctgtgagatttcgaaacgccgttaatgataatcgtctgctctttcaattcatctgaaagctgtgcgattgagacgtgtttttttcctccgtatgtaagcttctcataaatctcgtcagaaacgatcagaatgccatgctccagacacacttttccgagttccgcaagctcttccttcgtatacataacacctgtcgggttgctcggtgaattgataatgagggcttttgttttctcggtgatagcctgcttcagctgctccggtgaaattttaaactgattggattccagcccttctgcatagacgggacgcccccctgccagtttcacctgctcaggatagctgacccagtaaggagtcggtataatcacttcgtccccttcatcgagaatgacctgaaataatgtatacagagcgtgtttcgctccagtgcagacaatgatttctgacggcttatattcaatcccctgatcgtttttgaatttttttgcgatactgtctttcaaggccggcagaccgcctgaaggcgtatatttcgtatagccttcattcatggaacgcaccgcggcatctataatgtgctgaggcgtattaaaatccggttctcctgctccgaggccgatgacatcatggccttccgctttcagctctttcgcttttgcggtaattgcaagtgttgcagacggtgttaatgcggatactctttttgccaatttcaacttgaactccccctaatacgtctcacggtgtgatgtttttgagaatcttgccgcttgtaaagtccacatagctaaagctatactgcccgcttttgttgatataggtcacttcccataacggaacattgttttctctcgccgggtgaacgccattcagcttggaaacaagcccttcgtcccgaacgatcttggcagccttgccgcttgaaatgccgtcactggctttttttgagagaatttttgcttttttgtcggccggaacccatacatacatatcttttccatgtttatccgttccggtaacaacataatatttctgtttgccgacaaaggtctccactttctcagcgtctgtcagattcgttttttctttagcggctgcggcagctgtttcgtggccttcttctttttgagccattgcagatttaaaaatgctggccgaaaataaaagaactgctaaaaaaataataccaaatacggctgtaaatattaatgctttttttctcatctttttcacctatgtgcgataaatggtgaagaccgcttcattttgattttcttcgtcgagcgcaaggccgaacatcaggttgtcccgtttcaaagtccggtttaatgtatcgacgattttatataaatcatctgaatgctccacattaatcgttgacagaatttcaattttgctttccatttttataccctccatcggtcgaacaaattttgttagtcataacgggatgcgcccgcggcataataaaatcacaaggcggcatgaacccgcttttactataaaaacaattcctcatcccacaccacgaaagccgcgtttatgcggcttttattccgtttggctgacataagccccgagttcggcatccgtcagctccaaaagggatgaagtcgggagcgcttcaagaaacagccgtccgtatcccgccgtctttacacgctgatctaaaagaacgatcgttcccttgtctcccgccgtacggagcaggcgcccgatcccctgtctgaacgttaacacggcctcaggcagggaaatcgtctgaaacggatttttcccctgcttcttggcaaattcgcattttgcggcgtgaagcggattatcaggcgccctgaaaggaagtcttgcgatcatgacggttgacaattcatcccccggaaaatcaacgccttcccagaaatgattcgttccgagcaaaatcgaccggcttgccgttttaaaggttttcattaatttaccgggactcccgcctgaaataccttgggcgagaagctgaatgcctgagatctccatactgagtttcagttcctgatacacttttttcagcatatcatgagacgtaaacaggacaaggatcttcggctgttttccctttgacatgatttctgcatacttggcaatatgctcaatgacttcccgctccccgtcatatttaacggatttcatctctttcggaatgatgacgttcatctgatcatcgtaagaaaaaggagacgggatgcttttggtgcgcggataaaaatccgcaagtccgagcctttcaatcataaattgaaaagactgctccaccattaaggtcgctgatgtgagcacaacgctttttttgcgggcgaaaaactggtctgccagcatttcaccgggctccaaaggctgcgcatagatgctgacggcattttttgcgcccttcgcatcaatttcaacccaaacggcttctttctcatcattttcaaacagcagcctgctgaacgtatcgcgatattctttcagccccctgatacactttacatattcgcccgctaaaaaagccgctccgcttttcatctgatcaagcttttgatgtaacagtttctcctgtacggaaaacatgtcaagcagctgatcaagcatcgcacaaagccgctccgctccgtccgttatcatgtgaaaccctttatcctggcttttatgattgagactatagacgagacggttcagatcgtctttaggttttcttcgtttgacaaaagaatgcactgaactgaaaaatgcgtcgctttccgattgaatatgcttcatccactcatcggcgtcaaaaaaactttccgccggcagttcatacgtataaaacagttttctcatccgctttaacagtccgtgttcctttaaggtcccgattcggctgagctttgtgtgcagtccgatgtatgaagctctcttccccaggtgctcgctggcggcgcgttcgaaatgatgcgcttcatcaatgatgaccgttccgcttgcaggcagttttttcgtttcactgctttgatctgaaaacagcaaagcatggtttgtgataatcagatctgcggcctgcgctttttctttagcccgttcataaaacccggcagccgagtccttcccttttttcataaaagaattctcatcgtaagccatgcgctcccacagcaatctgccgcctgatggaagattcagctcagcggcgtcgcccgtttcagtctccgtcagccagacgagaagctgcgctttcgtcaaaaccgcatcatagttgtcatcttcctcatgcagaatatgttcaaacttcggcaggcacagataatgtgatttcccttttaaaatagcagctttgaccggccaaggaaacatacgctccaaaagcggaagatctttagacatgatctgctgctgcaaaagagtagagtacgtgctgataatgacgggagtttgttccgctttggcaaataaaacagccggaacgagataaccgatcgtttttccgatgccgggcgccgcttcaatcagcgcatgctcccgattgcggaaggcgccaagcacttcatccatcatcgtaagctgtcctttccgcttttcatagcgggggatgatgccggacaagatctgttctttttcttcgttccacttttcaaggtcaatggccgcattcaccggacgggaaaccggaatgtgatcgggctctttaattgaaaaagaggcgtatggaatgcagctcttttcttccgccggcctgctttcatgaataaaagaatccaaaagcagcgtcaaatcgctgataaaatgctgtgaaagccttctaagctgctttaacgtcggtaaaggcagatgtttcagtttatgtaaaatgtctaaaaagaccaggcccgtaacctccgcatcgctgtctgcgcggtgagggcggtcatgaacaatattcagctctgcgcacaactcaccgagcttatatccttcaaaccccgggaaaacaatacgcgaaagctcaaccgtatcaagcacttcacaatccggcagctcatagcccgcttcgctcagttcatgccggacaaatccgaggtcgaaatgaatattgtgggcaacaaaatacgcgccgtcaagcagatgaaaaatctcctctgcgaccgcttcaaacggcagttcattttcaaccattccggacgaaattccggtcagctgttcaataaacggcgggatggcctgattcggattgatatattttgaaaaccgctcagttatttgtccattttcaatgacaaccgctgcgatttgaatgattttatcgccctttttcggcgaatttcctgttgtttcgacatctatgacaacgaaccgttgtttgttcattaaaatggacacctcaattcttgcatacgagaaaagtgtaacacgttttgttgagaaatggagcggaaaaacagcttttgcccctaaatcttaaaagaaaacccccatgaagggggctcttttacaaaatcgtgtgtgccggctcctggcccagcatctgctcgattttattctgatcatccagaacggccaccttcggctgatggctttttgcttcctgatcagacatcatttgataagaaataataatgactttatctccttcttggacgagacgggcggcagctccgtttaaacagatgacgccgctcccccgcttaccgggaataatatacgtttcaagtctcgctccgttgttattattcacaatctgaactttttcattagcgagcattccgacggcatctaaaagatcttcatcaatcgtgatgctgccgacatagtttaaattggcttccgtcacggtagcgcggtgcagttttccggccatcatagtgcggtacatattatgatctctcccattcatcaatatcaataatgatattatcaatcagtctggctttagaaaattggacggcgcaggccagaatgaccttgccgtttaatgttttaagcggagtcagctccggataagcgtacagttcggcataatcaatgacgccgcttgtgttttcgatgataccggtgacggtttttataacggtttccggatttctttcaccgtctctgaccagttcggcaccttgctgcaatgctttatagatcatcggcgcttctttgcgttcctgctcagtcagatagacgttgcgagagcttttggcaagtccgtcttcttctctgaccgtgtccactgcaaccaattcgatatccataaagaaatcctcaatcaatccgtccacaaccgctgcctgctgggcatctttcaggccgaagtaggcgcgggtcggtttaacgagattgaaaaacttcgtcagcacagtggccactccgtcaaaatggccgacgcgggagacgccgcacaacacgtcagttctccttttcacttgcacggcaacattttgctcgcccttatacatgtcactcggagacggcgtaaacaaaacatctgctcccgcctgttctgcaagccgggcatcgcgctttaaatctcgcggatatgcttcgtaatcctcgcccggtccgaattgagtcggattgacaaagatgctcatcacgacaatatcgttttctttgtttgctttttcaaccagggtcaggtgtccttcatgaagaaaacccattgtcgggacgaatccgatcgtccggccttctgagcggtattgtgcaattaattctttcagctgttgagtttctgtcagttgtttcatcgcttactttcctccgtataagccttgcagcacagtttggtttatctgaaaggaatgcttttcttccgggaaaacccgttctttcacatcacggacataatcgctgagggccgactcaatcgtgccgtcgattttggcgtattgcttcacgaacttcggtgttctgtccacgccgtggccgacgacgtcatgatagacaaggacttggccgtccgcttttgaaccggctccgattccgatgacgggaatggatacttcttctattattttagcagtcagttcagcaggcacacattcaagcacgagcatcatcgctcccgcctgctcgcatttgatactgtcttcaatgagctttttcgcgctttgctcatcttttccctgcactttatatccgcctaatacgccgacagactgcggtgtgaggcctaaatggctgacgacgggaattccgccgagagtcagcgcgcggatggattcgaaaacgccgtctccgccttccagctttaacgcgtccgcgccgctttcctgaataatggccgcggcgtttttcaatgtatcctcttttgaaaggtggtaagacataaacggcatgtcagttacgataaacgtatttttcgcaccgcgttttaccgcttttgtatggtgaatcatgtccctgaccgttacgccgacggttgaatcgagtccgagcacgaccattccgagcgaatccccgactaaaatcatgtcgactcccgcctgttccgcaagctttgcctgcggataatcgtaagcggtcagcatcacgatcggctctccgttttccttcattttcatgaaatccagttttgttttcattctgtttctcctcctctaaacggtgaggagatgagccgccaattcttcgcaagcaaaaaagccttctgtaaaataagaaggattcccacttgtttaacgttcggcgaatgtcatccctctgtcccagtccttttttggatcaaggcagacttttcgtaatctctgttctgctgatcaggtgcagttcattatgatactgcccataggaagtataccaaattcacgaggcttgtaccaactaagattaattgagctcaatatcggcagaatagatcttctttataccgtctctcgtttccaaaagaagaactccctcatcatcaatgccgagcgatttcccgtaaaacgttccttgcagcgttctcgctctgagctcgttccccagtccgaccgcatagctttcccatagcagcttgatcggtgtaaagccgtggttcaagtaatcctgatagcgtttttcaaaagtcagcagaatctcttgtatcagacccgctctgtcaattttttcaccggcttccatgctcaggctcgtcgcaatgtcctgaagctcgccgggaaaatcggtttcctgctggttcacgttgatgccgatcccgagaataaccgaacggacacggtcctcttccgcctgcagctcagttaaaatcccgacggcttttttgccgtgaatcattaaatcattcggccatttaatggcggcctgtacgcctgtaaaagcctcgatggcctgtacgaccgcaacggcggataacagggtgagctgcggcgttttttgcaaaggaacgtcgggtctcagaatgaggctcatccaaatcccgtttccctcctgtgaatgccatactctggccattcttcctctgcctgccgtttgtttatcggcgactacgagggtcccttccggcgcgccgtcattggcaagttcatgagcggttttttgggtggacggcaggacgtcccggtaatgaagctgtttgcccaaaacctctgttttcagcccgaaacggatttcggattcactgagtttccccggttttttaatgagcctgtacccttttcgtctgaccgcctcaacctcatagccctctttgcggagctcctctatatgtttccaaacggcggttctcgagcagccgagcgcgtcacttattttctgcccggagataaagccgtcacccgcctcagaaaataaatcaattaatcgggttcttaatgttgatcccatgatgcgagccactcctttatgtcatgttttcggttaggaagcttccctgccaataccgcttcttcaatccggcgaagttcttcggccacccatttacccgcgcggcggtttctgagctccatcagatcagcgcctgaaatgtcgaggtctcgaaggcttttgatcggcagctgctcatacaggctctgaacctctttcagcttttgttcatcaatcgtcttatgctgtttcagcatcccgattttaacggctgaaaacagcgcctctcccgctcggtacatcgcttctgcttccagctgcgccggataaacgcttatgatctgcaccgctttttttatgacctttcccggcagtttccattgttttaaaaacgcctcggcacttttcggacaaagaccgagaaacaataacagcgctgcccagcgttcttcgcgtgcatctaaagaagaaaacggaaagccgcttgcttcaagcatttgctgctcataaccggaaaggccgggcagctcttgtatcagacctgtctgcaccatcgtttgaatcgcttcttgtgagaaagcgccctgcatcagcttttcaaactcgacggtctttcgttctactgatacatgtgccaaaagctccctgtcttttatgacggcctctcttgtttctttttctaacagaaagccgagctgactcataaagcggacggctctcatcatccgcagagcgtcttcccgaaaacggtcttcagggttacccaccgtacggatcagcttttgtccgatatcatgtgcgcctccgaaataatcaagcagctctccttcggcagacatcgccatcgcattaatcgttaagtctctccgctttaagtcttctgataaagaagtaatgaaccgcacagcttccgggcgccgatagtccttatattctgattcggcacgaaaagtggtgacttcataggtttcatcttcccacaggacgatgacggtgccgtgctcttttcctacatcgacagtccgcttaaagaggcgctccacctcattcggcgaagcgctggttgcgatgtccacatcacctatttttcgtttcatatagctgtctctgacggctcccccgacaaagtacgcctgatggcccgccttcatcagatgatgaaggatggggagggctttgacaaattcctgttccataagatcactccggtcctgccaattcgtcataaatccgttcatactgactgacgattctttgcgaagaaaaggaggtctccaccattttcagcgcatgatcagtcaatcgtttgctgagctgtttatcttctaaaacggcaagcgctttttcagatgccgcctgaatatcgccgacttccaccagaaaaccgcttacttgatctttaatcacttccgggatgccgccgatatttgttccgatgcacggcacgccgcaggccatcgcctcaaggaggacgagtccgaaactttctttttcagacagaagaagcttaagatcgctgatggaatacagctcttccaccctgtcctgatttccgaggagcagcacttgatcctgcagtccgtatttttcgacaagctgccaagcgacgcacttttccggcccgtcaccgacaagcaggagcttcgcctttgtgttggctgcgatattacggaaaacgcggatgacatctttaacacgttttacttttctgaagttcgaaacatggatgacgaccttttcatccggcaaaataccatgtttctcttttatactctctgtatttttcttaagataaacacgttcatcaataaagttgtagatggtctcaatttttttatccggcttgattaagtcatatgtttctccggcaagcgcggttgataccgccgtcactctgtcggacgcttcgatggcaaaacggattaaatcttttaatgacggatcatatcctaaaacggtgatgtctgtaccgtgaagcgtcgtcacgatcccgatgtcacgcttgagcatctgtttggctagataagcgcataccgcatgcggcagcgcataatgcgcgtgaatgatatcaagattttccctcgcggccacctcggcgattttgctcgccagtgtaaggtcataaggcggatgtttaaataccgcgtattgattgacttccacctcatgaaaatgaatattcggatgatatgtatttaatctgaacgggatgcttgatgtgatgaaatgaacctggtgccctttttccgcaagcagcttgccgagttccgtcgcaataatacccgagcctccgacactcgggtagcatgtaatccctatttttaatggtctcattgtccgcccccaaaaacatcatcattcaaaacgggaagctgttttgaaaagaagccttcagcataccccgtcccggcttctttgccatacagtctttcccgcgcttccaccatttcgatataaccgttggtcagcggtgtgttcactgactgcgccgtaggaataaactggctttgataagcgtgcaggctttcttttttcagatcgatggtttccgttatgtcgattacaaagtccggacggtgaaacccgttgatcatataatagtatacgcgctgagccttatgagccggcagttcctgatgatctctgtatttatgaattcccgccgagaacaccgcttcttcgaccaaagccgccgcattgccgtggtcaggatggcggtctttcggataaggcatgaaaacggttttcggccggcaggctctgatgacactgacaatccggcggatgccgtcctcacttttcaaaagcccgcggtcgggaagcgtaagctggattctctcttttacgccgagaattcgtgccgcctctgccgcttcttcttttcttatccctaccgttccgttagatgatagttcggcctcggtcaaatcgcatatcaccgcggtttttccttgagccgtaaattttgcgatcgtgccgcccataccgatctcgacatcatcactatgggcgccgaacgccagaatatcaacgtgttcagacattcggctctcctccgcgcacaagattgcggaaatcaaatgccccgccgtccagcgtccggacaaggatttccgctgttcccatatttgtggcgagcgggatcgcgtatacgtcacacagccggatcagcgcggagacatccggttcgtgaggctgcgcagttaacggatcgcgcagaaaaatgacgagatccagggcgtttgccgcaatcaatgcgccgatttgctgatctccgccgagcgggccggattgaaaacattcaacggacaatccggtcgcttcctggatttttaagcctgtcgtacccgtcgcgtataactcatgatggctcaatatatctttatatgcggtcgtaaactggaccatatcctgcttttttttatcgtgagcaatcaaagcaattttcatttgatgttctcccccttgccgattcagtcgataatattttcgagtccgtatacaagctggtcgattttcatcacttgctccactgacagcttcactcctgacataaaggaagcccggttataggaatcatggcgcagtttcagcgtctggccgtccatgccgaacatgacttcctggtgggcgataaggcccggcagacgcacgctgtgaaggcggatgccgtttaattcagcaccgcgggcgcccggcagaatttctttttcatcaggatggccctgctgcttttctgtacggacgcttgaaatcatttccgctgttttcagcgccgttccgctcggggcatccagcttttgatcatgatgaagctcaatgatttctacatcttcaaaatagttggcggccatttgtgagaacttcatcatcagcaccgcgcccaatgcaaaattcggagcgatgatggcgccgattcctttttcttcagtcaaggcttgaagctcctctaaatccgcttcagaaaatccggtcgttcccacaacggggcggacgccgtgttcaagagcggctttcgtatgttttttgccgatttcaggcgttgtcaaatcgatcagcacatccggttttgtttcttggaaacatgcgcggatatccgtataaataagagcgtctgaatcagctgacatcacttcccgtaatgtttgctgatcgtatgtatggtcaatggcgccgacaagctcaaaatgaggcgtgcggacggcaagttttacggcctcctggcccattctgcctctcggtccggcaatgacgactttaatggtttcatttgacatggtttctcctactttccttcttcttttctagtccagcggtctttatcacgtgtattaaatttatgcatgacgcggttatgagcttcctccaatgaaatatcaagggagttggcgaggcagatcagaacgaacagcacatcgcccatttcctcttccatgcttttctcattttccgtcgttttcttcggcttttccccataataatggttgacttcccttgcaagttcgcccagttcttccgtgagacgggccatcatggcaagcgggctgaaatagccttctttgaattggccgatatattcatcgacctcagcttgtaagtctttcatcgttttgtcactcactgtgcgaatacctcctgtcatctcttccatgttagctaattcaagtacatttgacaaatgttaaaaacggcagtttgctgttttcttttgtatccactataatatttacgcaatcttatggaaggaaaaggggtttgatgcaatgcttggagaaatcagaatcaaaaacatttgctttattttaatcggcgccgctgttttttcattcggactggttcactttaatatgcagaacaatttggcggaaggcggatttaccggcattacgctgcttttatatgcgttattccacatcagcccttctatttccaacctggtattaaacattcctatctttttcatcggctggcgtatgctcggccggacgatgtttgtctataccctgatcggcaccgtctctctttccgtttttctgagtgtttttcagcgctacgaaattcatatgccgctgtcgcatgatttagcgctggccgccttgttcgccggtgtttttatcggcgcgggtctcggcattatttttaaatacggcggcacgacgggcggggtcgatatcatcgctcggctgatcaacaaatttttcggaatcccgatgggccggacgatgtttgcctttgacgcctgtgtcattctgctttctttgtttacgtatctttcttacaaggaagcgatgtacacgcttgtagccgtttttgtcgctgcgagattgattgattttatacaggaaggcggctatgccgcaaaaggggcaacgattatttcttcgaaaaacgatttgatccagcaaaaaatcattgaagagatggagcgcggcgtcaccgttttaaaaggacagggatcatatacaaaagaagacagggacgttctttactgcgtcgttccgaaaaacgaaattgtgcttttgaaaagcgtcatcacttccgttgacccgcacgcctttgttgcagtaagcgacgtccatgatgtgctcggcgaaggatttacgcttgatgaaaataaaaatccgatcagacgataataaaaaggcggcttttgccgcctttactgttcgtgtttccatttgacaaccggtgattttttctttttcaatcggcgggcgaatgccggactgacattgagcgtctgctcgacgaagcgctgcggcgtcagtgccagccattggtttaaggagacgtcttcgaaacggtcgcttttgaagatttccagaaagcgaagcacggtgtcaccggtattctgaacataatgtcccattgcaacaggaacatatcctacgtcacccgcttgatagttaaatgtccgcgctcttccctccgccgcaaacaccgtcattttcgcttctcctgaaaggtaatactgccactcgtccgtattcgggtgccaatgcaattctctcatgcctccgggttcgacctccacaagagctgcagcaatcgtttttgacaccttaaacgtttttgaatcgacaatctttactcttcccccgctggtaacaagaggctcctgccgggaaagcttgtagctgaacggctctaaaacggggccttccggggaagagactgctgcccgctcaattgggggcggcggttccaactggaacatataacgctctttcttgtgaatgtaagccagctcatagcccggaacaccgaagttcgcctccagcacgctgcgcggggtgtgggcaaaccagtccgttactgaaaaggtgctgttttctgaaaaagagccgtcatcaaagacgagcaaaaactcacttccctgctctaatccttgaatggaatgaggaatgccggaaggaaaataccacaggtccccttcacttacgttatcaataaaattccgcccattttgatcgaccgcagttaaacgtactcctccgttaatcacatatccccattcggcttctttatgccaatgaagctcccgcacagctcccggtttcagcctcatgttcaccgccgcgatgtttttggataccggcagttccctgaccgtcacctctctggaccatccgccgtcttcaagcctcatatgcgtatcagaaaatgagaatttcaagttttgaaccgttcctgcatccgttgaaggcggaacgagcatgtcaggattctggaagtcacgcgcgaggtttcgcggtccttcgtcagtcgccccttttctgcctctgatcggctgcgggaggtgttttgaagccaattgctggatgagttttttcactgacttagctcctttacagcaatttgtgtttatttagacttaggatactcacgctttttctctttctttttttccgctctgtattttcggtagccgacatatgtcagcgcagtaataatgataccgcctgttgtcagaatgacccagagcagcgaagggtcagcgtcatcccgctccaccttgtcaaaaacccgctttaaatcctgctgcaggagtgtcagacgctcaagctttgttccttttgtcatctgctgaaacccttcctgctcaatcacctcgatatgtttcgccaccgtatcaagctggccggccgacacatccattgtcaggctgggataaattaaatcatataatgatataaattcattccacttttcattgaaatttccacttccgtttccgctgacatcttcttttaaggcgctgaatgtcgccataatcggtctttcaagcgaaccccacagcggatcggagtggtcttccatcgcatccattaccaacctgaactgggcggctgcccggattttttcggtatctgaggcgtctgcctgtttcaggacgcgcactaaatcattgaagcccagagtcacctgcctgacttcggcgccgctcagtgagtttacgtgtgtcatttttttcttaaagtagccaagcacttgcagagcctcatcatactgcgaatgccgcgtcatttggaaaacggtatccgaaaggtcgttcagttccttgagaccgccctcatcttcagctttggcagttgtgatgaaacacataagagcaagtaaaagacagatcgtcagctttcgtttcatagaggtccctcccactccttctctttacagaatatgaggagcgggacaaggttagaccaagattctatcagtgtaagtcaagctttatccgtcttttagaaatcaccaaatagtatgcaaggccgagtgaaaatatgctcagccagaatgtagcatagccgatctcttgcatatagtcattgagcattgagtagcggggcatcatgccgaaaagataatcaatgacgtcattatgaagcgtccaaacagcagcaacggcaagatgccataaccggaaccgaaaatacgggctgtataaaacgccttgaacggccatggcaaaatgtgaagcaatcagcatatacccttcccaaggcatctgccccattttgaccagcacaaagacattcattccgaccgcccacagcccgtattttacaagggttacaagagccagcgcttcaaacagcggcgcgtttcttcccatgagaaatgccagaagcacaaacaggaagaaaaacgtcgccgtcgggctgtcaggcacaaatatcagaaatcggaacggcgtgtccgcaagctgcggcacataccaataatagccgtacaccgtaccgataaaattaacggcaagaacaagcagaagcatgccgcgcaaccctaaaagataagaaatccacctcataccatcaactctcagtccgtaaaaagtatgtatcatgcaaaaaaagctgacatccggtcagctcttttcataaagtatatcctgctgttgtctacttcacaatacgttatttcgctgtcgtttcagaaatgaacttcgccagctgatcaagctgtttgtcattccctttaaaaataccggctggcatctgccctttccctttgacggcgatttttttaatttcttccgggctcagcccgttatcgaccagggacggaccggcgcctcccccttgaagattatccccgtgacaggaaatacagccttgttctttaaataccttataaccgtctgattcagtatcaatggcggcttcttttttaattttcccttgctcctccgcctttgcccagtcatgtgtcgcgactgactgccacgttaaaaagaccgtagcgcaaagcgccaaaagcatcatcccgacagcaaccggacgcttccacggccttctttcagaccccctgtcgagaaacggagccaaaagcagcgacccgaaggcaagccccggtataatcatcgctccgataacggtgtagctccctgcggcatattcatattttaaaagctggtataaaaatagaaaataccaatccggcagcggaatataccctgtatccgtaggatccgccacccgttccaaaggcggctcgtgcacaatcgttaaaacgagaaacccgacgaggaaaacggccccgaccatccattctttcagcagaaagttcggccaaaacgcctctgtctttccaggatactctgaatagtctttcggtatattcggttttttttcagccggtatccttgaatctcctacaaacttcattcctttcccccggtgcatgtcatcccctcccttttatatcagatttgtattaaagcggtcctgaaattccctgcttgcggatcataacaaagtgggcgcccatgagcgcaaacaaagcggcagggagaaaaaatacgtgaatcgcaaaaaatctcgtcagcgtttgagcgccgacaatatcgtggtggccggcaagaagagttttcacctgcgctccgatcaatggcgtcgcctcggcaatctgaagacctacctttgtcgcaaacagcgccttcatatcccacggaagcaaataccctgtaaatccgagaccgagcatcacaaaaaagatcagaacaccgacgatccagttcaattcccgaggctttttataagctccctgaaagaaaacccgcagcgtatgtaaaaacatcatcacgatgactaaacttgcgccccaatggtgcataccccttacaatctgcccgaaagcgacttcattctgcaaataatacacagattcccacgcgttttttatatccggcacataatacatcgttaaaaacatcccggagagcacttggataacggttacaaaaaacgtcaaaccgccgaaacaatagacaaaagccgagaaatggtgagcgggatttacatgttccggcacttcatggtcggcgatatcccgccacatcggcgtaatatcgagacgttcatccacccagtcataaattttattcagcatgtcacccttcccccctaggctttgcttttccaagatacaaaaagccgtcctttactttttgctcataacggtcaagaggcgcgagcggcggcgtgcccggaacgttcgtgccgtctttttcatacagcccgtaatggcagggacaaaagaatttgttcggatttttaggatcattgttccagtttacggtgcagcccaaatgcttgcagatcggagaaagcgctataatttcatccccatgcttgtaaacccaggctgacctggattcttccgattcgtaccaggcgtcgacttgatgaattttaaagtcaaaccgcttcggctccttcgtcagctcatccacactgacaacctgcaccattttttgatctcccgtcggttttaataccggatccagcgcaaaacggaccataggcataagcgcactggcggccataaatccccccacgccggtgagcgcatagtttaaaaattgtcttcttgatatatcttgttttccgcccatctcttccccccctaaagattgaccaaaaattaactaaaatagaaaataattctgagatttgacaccctcataatatatgaatctttcagcaaggtcaacagaggcaaaacgggtgttttgcaggatgcctggagtttttaagaattgttccacttctgtaacaaaacgttcaaaatttctccgcacttgtcatccgcaatttttctctttaaagagtctttcatatgttcaaacggaacggcaggtatgtatatgacatcagaccctatttcagaatccttccatttttcgtctgccgtcaggaacaaggcgtgcctgaagttggtcatcacctcttctttgagtttttgaagcagggcgatttgtgattggtctatatcaacatatgtataagaggggaataaatatacccgtcccttcaattggcgctcaagctcttcagaaagcaattgggtgctttccccctgttcaacggcctcttttaagcctcctgaagacgttatggaaattaacggaatgacagcggtatcaatgtaatccgcagattgtaaataggcatcggcatcagcggccctccatctcatgtctcgttcctcctctttacgcaacaagccttgcatattctgcaaggctgtcatttatgtgagctgattcaattggcgggaaagcttttcaaatgtttctttgtcgtggcggtccagcgcctcgtcgatatctttaagcagcttttcccgctggaaagtggaaatggcatgttctaatattttttcagccatcccctgatcctgtttattttcaaacaggtctttcggcagatgcggatttgattcaagaacagcggcatattccggtgagctgtaggccgaacggaaattcagctggataaataaatcctgctgtttatttaaccggatgtcgtgaaaagatttttccgcgtccgtagtcatgacattttctttgtaaaacctaaacggcacctcatcaacgcaatgagtagacatgataatgcctctcgggcaaaattcggcttgttctacaaaatggactttttccattaatgaatcatgactcattaaataatttaaaatccagacgcactcccggcgtttaagctgataatgatttaaaaaccaacggataaaatcctttttttcattgacagaaacaggggtctgcatgtaattccctcctctatcgatcgtataatctgacatcacttatacattcagcaagcatggtccaaaatcctgcttatcttaaaaattcatcctctatccgtaagattgtttcttcaagctcttcgtttgttccatccattgaaagcacttgttttaaaagcggcagcgcttctttctggagaccctcttccaataagaagtgagcgtattcatataagaaatcccgatcatcctgataatggagatacgcagcttcgaagctttttttcgcttcagcgtattgctccaggcctgtataggcccccgccaaataccaattgtatttcggatcttcttctccgtagccgcggacttcctgaatcagatcaataatctcttcaaagctttcttctttatgatagacggctaaaagcgtatggagcgcttccacgtaacccggatcgagcgccagcgcttcctgaagaagctttttgccttcctcttcgctgccgagctttaacgccattttcgccgcatagagaaaaagctctttattgtattcatcgtaagtaataccttctttagcggtttttaatgcatcttcatacatgccttctgcctcgtagctttttgcaagcggcatataaagcgatgaataggaaggatcaagcccttttaaatcagacagctgcttgatggctgttttgaccattcccgcctgataggctgtgaacccgtacccgaaaatcgtattcggttctgtatgttctgccgccgctttttcataccatgaaatcgcttcctcaaattcacccgccgcgctcaatgactcagccagcctctgatgaacgtttacgccgccgatttcgtgccgttcttttgccgtctcttcatagtaaggaacggcttttgcatatgatccctgagtgaagtataattcccccagagcgaaatcaataacaggttcatcttgtaacatcgctttcgcctgtaacagcttttgctcacttacttcaaataagccctgcatctgatacagatcagccattaaaaggaggctttccgcgtaagacgggtcttccggagaaatcgtctccagcacctcaagagctttttcttcttcatcaatatctattaacaattcggcgtaaaaattcgtcagctcagactcacccggatagaggtcatgcagatcactgatcagcgctaacgctttttcggcgtttccccattcatagtagagctgggctgcaatggctttgtcttcgtcatgaagctctgtttcagcttttgaaagcgctttgagtcccttttcggtttcacctgcttcaactaattttatggcttcttgaatcaatgtattcaaatcagaccggtcctttcttttcctatacctcatcaaccaaatgaaaagggtttttattcgggttattcttatcataattcagacagggcctgcccgcaaataagatgcttcacccggcattatagtttatcagaaaatggttaagaggaaaacggcaaaaaaggggacggcatctttatacgcaaacagcgcaatttgttccggctgtttctgtaacgaaaacgcattccccctttcttttagttttctgtttaagacaagctatgtcaaagcccaagattttatgacacatgaagaaaaaagcccgaagaatcgtcttcaggcttttttggctaattgatctaaatgctcaaagaatgtcggatatgagacatggatcgcctctgtatcacggatgtcgatcggctcttctgtcaggcatgaagcgataccgagcatcatgccgatgcggtggtcgccgtggcttgacacatcggctccgcccgcaagcgtttttttgccgtgtattttcatgccgtcttcagtcggttcaatgtctgcgccgattttccggagctctgatacgacggtgtcgatccggttcgtttccttcaccttcagctccgcagcgtctttaatgacagttgtgccttcagcctgcgttgccaaaagggcgataatcgggatctcgtcaattaaacggggaatgatttctccgccgatttctgccgctttcagagctgaggtttcaataaccaggtctccgtaaggctccgcactgtccgcttctgaaggaatcacttcaagtgaagcccccatttgctttaagacatcaatcattcccgtgcgtgtcgggttcaggccgacgtttttcagcacaatccggcttccgggaacgacagcgcctgccgcgaggaaaaaggccgctgaagaaatatcgccgggcacgaaaatatcggctccccgaagcttctgaccgcccgttacggaagcgctcgtctccgtttccgcaagctcggcgccaaaagcgttcagcatccgttccgtatggtctcttgatttatgaggctcagtgacggtcgtcgtcccttcagcctgcaatccggcaagcagcacggcagatttgatctgcgcgcttgcaacaggggagacgtaatctatgcctttcaattgtccgcctcttacggataaaggcgtaaaccctccgtccgctcttccgtcaatcgcggctcccatctgttttaaaggctccgtcaccctcttcatcgggcgctttgcaatactttcgtcacccgctaccgtactgtgaaatgggcgtccggctaaaatgccgagcatcaggcggatggtcgtgccggaatttccgacatcaagaaggctgtcaggctcacaaagtgcgtcaatgccctttccgtatatcgttacatcacttccgttttgttcaatggagacacccatttttctgaagcaggcaatggtgctcagacaatcggctccgggcaaaaagttttttaccgttgtcgttccttccgcaagcgctccgaacataacagaacggtgggagatggatttatcccccggaatatgaatttcaccgtttaaagacgtcactttttctcttttcaatgttttccacctcagtcagcgtaaaatgtgtcatatttggcgcgggattgaatgcaggtttccgcgcgcttccggtcatcatcagtctggaaactgattctgagaattccgttaatatcttctcttgtttcgataatgcggatgttggtgatactgattttttcttctgccagtatcgccgtaatttccgaaatgaccccggatgatcgggaacatcgacataaaggtcataaaaggacgggatcgctcctttttgacggagcggcaggccgtcgcgataatctttcgcttttttaaaatatccgaacaggctgtccgcatcttcattttctacataagattcgatcgtgtcaatctcccgtttccattctttgaagcggtcaagcagtttatctttgttatgaagaagtatgtctctccacatcgccggactgcttgaggcgattctggtgatgtcccgaaaaccgccggctgcgaaacgcttcaaaaacggataattttcttcagaatgatgagcctgatggacgaggcttgcagcaacgatatgagggaaatggctgatgacgctcgttacgccgtcatgctcctcgggagtcatctccacaaagtgggcgtttgccgctttcaaaagctccttcagatgcgttactgactctttagaagttgattttccgggtgttaaaatgtaaaacgcattttcgaataaaaattctttggcggcagcggccccggatttatgagaccccgccatcggatggccgccgacaaattgataatgagccggaagcactttgtcggcgtagctgacgactttctgtttcgtgctgcccacatccgtaatcaggagttcatgggtgatgtctgatgcggccagcatatcgagcattttcagcgtttgggcgacaggcgtggcgataatgacaacagacgcttgctgcgccccttccgtcaatgagccggcccgctcgtcaataattccgagcttcagcgcggcagtgagctgttcttccgaaatatccacaccgataatccgtttatgcggatgctcctttttgatggccaatgcgatcgatccgccgatcagcccgatccccgcaagcaatatagtatccttcatttcactcatttcctttttcaactattttaatagagcaaagaggtgatgcttgatcacctcttataatatttcagctaagattgtgagaatttcctcattctgctctttcgtaccgaccgtaatccttaacgctgtcggaaatccgagcgcctgtcctgaacggacgatatatcctttttccaacagggcttggaacagttcatccgccggacggttaaaatcaatgagcacaaagttggtttgtgaaggataacaagttaatccgtgagtttccgcaaaatcataatactgcttaaggcccgctttatttttctcgacgcattcctgaataaatgtgtggtcgtcaagcgctgccagtgccgaagcctgaccgattctgctcgtattgaacggctctctcgccggttcaatctggcggatcagcgcttcgtccgcaatgccgtatccgacacgcagcgcggcaagtccgtacgctttagagaaggtgcggaggatcatgacattcggatattgctttaaaagcgggatgctttcagggtaatcgtccgccgtaacatactcgtagtacgcttcatcaagtacaacgagtatatgctcgggaactctgtttaaaaaggcaattaactcttgctcagaagtatatgtccccgtcggattattggggttgcatacccatatgactttcgtctcgccgtcaattgcttccagcatccggtctaaatcatgagcgccgtcactgcggagcggcacctcgcgcacctcagcgccttcaatcaccgcattgtgtctgtattgcgggaaagtcggggcggcggtaatcgtgtttgcctgatcatttaataaagaacggcagataatctgcactagctcatcagagccgttgccgaaaatgatcgaagattcactgacctgcagatgctcactgagccgcgttctcaaagcggcactgtaaccgtcgggatacagcgcaagctgctcaatctcctgatgcagcgcatcttttgcggcctgtgaacagccgaacggattttcgttagaagcgagttttactactttttcaagcccgtattccattttcacttcttctattggtttgcccggctgatacggtttcagctgccgcagctgttctttaatctgcaaatccagtcacctcattttacactgtacagtcgtccgaacgtcttcgcgtattcttcaaattcaagaagcgcatcagctcttgtgccgggattcacaagctttgttttaagctcttcaacttttttgacaagcgcgctgccgacaacgacaccgtcagatatttcattcatcccgtcaacctgtttgcggtttgaaatgccaaaaccgaccgccaccggaacagagctgaattctttcaccttacggatgaaagagtatacagacggatcgaattcgctgcgtacgcccgtcactcctaaagaggatacacaatacacaaagccgcaggcctgttcagtaattattttcaaacggtcttcacttgtcggcgcaaccagcgagatataagcgatgttctcctttttgcatgtcatttgcaaaagggcgctttcctctaatggaaggtcgggtacaagcaggccgtctatgtcgttttcccgcagtaaagcgaaaaagtattctttttctaattgtaacacaggattataatacgtaaagaggataattggaatatgaacgccgttttttttcattttgccgccaagttcaatggcttttacgatattcattccgttttccagagcccgttttgaagcccgttgtatgacgggtccgtccgcaagcggatctgtgtaaggaacgccgatttcaagggcagaagcgcctgcattctgtaatgatattgccagttcaacagaaatgtcaggaagcggatcgcccgctgtgataaaagggataaacaatttttcagaatctcgcagattaaacatgtgtctccaccccgttttccaaaacattcatcagcgtatgaacatctttatctcctcttcccgacaaactgacgagaatgattttgtctttatccatgtcctttgccatttcaaacgcttttgccagggcgtgggcagattcaatagccggaagaataccttctgtttcagaaagcagacgtaacgcggcaatcgcttcatcgtctgtcacgctttcgtacgttacacggccgcttttgtgcagataggcgtgctcagggccgatccccgggtaatcaaggcctgctgaaatggaatacggttcgataatctgcccgtattcatcttgtattaaataggtcattgatccgtgaatcaccccgagcgtcccttttgcgatcgttgccgcatgcagcggcgtatcaatcccttttccggccgcctcggcgccgatcagctcaatgtcttcgtctaaaaaggcctgaaatatgcccatcgcattgcttccgccgccgacacatgcaacaaccttgtccgggagcgttccttcaacccggcggagctgttctttcgcttcctcgccgatgattttctgaaattcgcgaacgatatacggatatgggtgcggacccactacagaaccgataagatagaaatgatcttcacaatgctggacccaatacctgattgcctcattcgtcgcatctttcagcgtgccgttgccgcttgtgaccggcaccacttccgcgccgagcagtttcatccggaatacgttcagcgactggcgcgcaacgtcttcttcacccataaaaaccgtacatttaaaaccgaattttgcggcggctgtcgcggcagccacaccgtgctgtcccgcaccggtttcggcgatgattttcgttttgcccatctttttagcaagcagaatctggcctaacgcgttgttaattttatgagagccggtatggtttaaatcttctcttttcagatagattttcgcccctcccaaatactctgacaccctgtctgcgaacgttaatgcagtcggtcttccggagtaatcaaacaatagttttttatattcggcatgaaaaacaggatcattttttaattctgtgaaagccgtttcgatttcctcaaggggccgcatcaatgtttcagggacaaatttgccgccgaattcgccgtatcttccgatttcatttggatatggatacatagtggttcatcctttcttctaaaagccggatcagtgtttgatccttgtgtccgtttttttcaattccgctggcaagatctataccgcacggacgcgttctcagtaagccggtaatcgtttcaggattaacaccgcccgcaataaaacagcgcttgcttgcattttgagcctgctttcggtacaaggggacacgggcccatgaaaacgcgattcccgtcccgcctctcattcctgtcactgaagaatcaatgacatagccgtcgacagcaggtgtaaattgagccatctgacggagcgtcccttccccgtgatggagcgctttccatatttccgagcgcacaagcggacggaggcgaagggcatcctcaggcgattcatcaccgtgaagctggatgacgtcaagtgccagatcagatgcgatttgcgcgatgttttctatcgtttcatttacaaatactccgacatgtttcttgtctgtccggacctgctctttccatttccggacctcatccggcgttactctccgtttgcttgcggcaaaaataaatcccagataatccgcttctgaagctgccgcaagttcataatcacgcttcgatcgtattccgcagtactttaactcaggctttttcatatcgtcactctccgaacagtccgcggatcgccttttgctgcgaatcctctctcattaaggattctccgaccaatacagcctgcgccccgtgcttgttgacgaattgcaggtcagccaaagaaccgatgccgctttcgctgaccagcaggcagccgtccggcacaagctgcgctattttttccgtttgcgaaacagaagtacggaacgtttttaagtcccggttgtttatgccgagaatgtccggctgaaacacttgtaaaatccgttcaagcacagtttcatcatggacttcaacgagaacgtccatgcccttcccgcgggcttccagataaagctcatgaagctttggaggttccagcgcttccccgatcagcaaaatggcatcggcgccgatcctgaacgattcctccacctgaagggaatcaataataaaatcttttctcagcacgggaagagacacggtttgtttaacatctgtcagaaattgatttctcccctgaaaaaaacgggtatccgtgagaaccgaaagggcgtcggctttagccgcttcataatccgccgcaatcgtttccggaacaaaatgctctttaatcaatcctttagacggcgaagcttttttcacttcggcaatcagcccgataaaacggttcgggttcaggagcgcttctttaaaggatctccgttcaatttgacaggtttccggcagcacgatggatttgatttcttcttttttctgcagaatgatttgatcaagcatacatttcttcctctttctgtttcagacgttcgagctgccttttggcatctccgttttgaatggcttctaaggctgttttcgttccttctttcagatcgtttgcaagacctgccgtataaatggccgcgcccgcatttaaggcggtaatatgcagagcggatgacggagctctatttgcaaaaatattctgaatgagaagcgcgctttcttccgatgaactcacttgaatatccttcaatgaaccttctgcaaaaccgaattgttcaggtgaaacggaatattccagacgttcaccgtttttcagctcaatgatatctgtcggtgctgtgatggacagttcatctaatccgtcacgcgccgacacaagcatgacgtgtctgacatcaaattgttccaaagcgcttgccatcaggcgcgctttatcaaatgaatagacgccgatcacctgccgcttcacctgcagcgggttgctgagcgggcccagcagattaaatacggttcggaagccaagctcttttcttgcggcggcgacgtgcttcattgacgaatgaaacagcggcgcaaacaaaaaccccatttgtttcatttcaatgctgcgtttgacgctttctggagtggcttgaatggaaacccccagcttttccagcacatccgcgctgccgcttttagacgaaacggagcgatttccgtgcttggcaactttagctccggcggcagaagctgtaatcgccgctgccgtggatatgttaaacgtagaaatcccgtctccgcctgttccgcacgtatcaacgacatccgccaagccacccgccgtctgtgcccgcgcccgcatcacttttacaaatccggcaagctcctccgccgtttcaccccggtgggctaataccgataaaatcccccgatctcagactgcgacatggccccgttcatcatcatctccatcagcttttcggcttctccggttttcagcgtgcggccattaacgcacgattgcagaaatttgttcatccgtcttctcctccctgccagaaaagatgtcttctgcgatttgaatcgtttttaaaagcgcccccgctttgttacagctctcttcatattcggcttccgggacggaatcagcgactattcccgcgcccgcctgcaccgacgccgtaccgtttttgacactcatggtgcggatggtgatacacgaatcaattgacccgtcaaatccgatataagcgatacatccgccgtaggtttctctggaagtcggttctaattcatttaaaagctgcatcgcgcggattttcggagcgcccgagagtgttcctgccgggaatgccgacatcagcgcatcaaccggatggacgccctgttttaaacggccggttacaacagagatgatgtgcatcacatgtgaaaaagaaacgacctttgtgaattccggaacggctacggaaccgtactccgcaactctgccgatgtcattgcgcgcaagatcgacgagcatataatgttcagctttctctttttcgtcattcatcagctcttttttgaggcgatcgtcctcttcttttccggcgccccttcttctcgttccggcaatcggatgaatttccaggtgtctgtcatccacgcggatcagacgttcaggcgaacttccgacaatgtctctgtcaggcagtttgatatagtacatataaggtgaaggattgacgatgcggagcaccctgtacagctcaaatgaatgtctggataccggaatgtcaaacttttgcgaaagcaccccttgaaaaatgtctccggcttttatatattctttcagtttattgacgccggccataaactcttctttcgtataattagatgtcatatcggcaaaacttggcgtttcaaatgtttctttagaaaaaaacggctctttcatatctttcggttctgtcaaaataccgataagcttacgaagctccgcgcaattttctttaaaaacggcccgcttttcttcctccgtctcccggccgttaagcgccgcatattgaatgaaatgcacttgtttcgtttcgtggtcgtacgcgatgattttccggcagacaaacagcatgcatttttcgaaatctgtttctttcgcgtggctcggcacggtaggctcaatcaaagggatcatgtcatagctcagataaccgacggcccctcccgaaaacgggatatcaagctcgggtgttttaatgcggaagctttcattcatccaatcaagcacggcttttaattctccggcttcaaacagcgtatgcccgtttggatcagcggcagtgaatgtgtgatgactctctttaatcgtgataaaaggatcgaggccgataaaagagtatctcgaccagcttgacgactcatccttgctttctaaaagatacgtaatgtttctgtccagtttttcaaccatctgaatgggtgtgatcgtgtcgaccgtaaaagtctctgcgattggaatggtgcggtgtgtcagactgtcctttaaaaataaagaaacatccgattgtaaattcatgattctcctccttacggtaaggagaatgagatgaagagtgagaggagtcttgcgtataagaaataaacccaaaagaaaggcttcttttgggcagaataaaaacgtgtttatctcagctcagctaaactcattctctgctaccctattctaaactcaactgttcaatatcttacttaccagctctatacacactcttgtgtatttctaagctttgtttatcgtattacatgtcagtattttttgtcaatgataaatccggccttaacacaacggctttttctaaatagacatgcttgatttcatcctgaggcgtatccgtctgaaccgtcatcaggacacggatacacttttgcagagcgccggtgacatccatttcctgcatgcacgtcaccgggacgtactgccacccggaaaggcggcggaccgcttttgccggaaatacggaatggatatcaggcgtggcggataacaggatctgtacaacgtcttccggcttgcatccattttgttcaatgattttttcaagcagctgctgtgttttttctaaaatttcttgttcggtgtcttgttccaccgttgttgctccgcgaatgccgcgtatcatcatgctgtttcctccattcgccatttgttcagcaaattttcgagctcatcttttgaaagcatgcagtcccgcgcttcccctaattcctttaacacgatgaactgtgtcatgcctccgcgcgtttttttatcattcatcatccgggcggagagaaccggcgtttcaatatcttgtctgatacttcccgggtagccgagcccaatcagccattgtgtgagttctttcctgttcatcttgcaacccgcaacctgttcactcacgtaaagggcaaactgcatgccgagggcgaccgcatctccatgagtaatccggccgtagccgtattccgcctcaacggcatggccgagcgtatggccgaaattcagaaaagctcttatgccctcttccttttcgtcctcacgcacgacggccgatttgattgaaattcctttataaatcatttcattcagctcagcgcttgtcagtccttgcaacgtgtcaaacgtgagaagtttttctaaaaaagcatgatcggcgataaacgcgtgtttgatcacttcagccatgcccgatctcagctcttgttccggcagggttttcagaagctccgtatcgtaaatcaccgctttcggctgataaaacgcgccgattaagttctttccgagtttatggttgacggccaccttgccgccgaccgcgctgtcatgggcaagcagtgtcgtcggcatttgaatgaaatcaattcctcgcataaaagtcgctgcgcaaaagccggtcaaatcacccgtcacgccgcctccgaaggcgatcatacatgaggagcggtccatatggaaagcgatcgcttccgtttgaatccgttcatactcttttagagacttcgcttcttctccgcttggaacgattacttttttcacgggccatgtttcgtttaaaagccggaacatctcatcgccgtaaagccggtcaacttcagcatcgatgacgagaaggatctttgtcagcggcctgttcagtgaagacaaaagagcagcggcctgtttccttatgccttcaccgatatacacgggatatgcggaggaagctgtccgaacctcaagctctttcatcagaattccctcgatagttttttcatgttttcaacattttctttaatgcggtcgatctggtcaagcccgaattgttctacgacggcatttgcgatttcccaggccactgcagcttcagccactacacttgctgccggaaccgcgcagctgtctgaacgttcaatgctcgctgtaaatggttctttagtttcaatgtcgacgcttttcagcggcttatacaaagtagggatcggtttcatgacgccgcggacgacaatcggcattcccgtcgtcataccgccttctaatcctccgagcctgtttgtggcgcgtgtatagcctttctcttcatcccatacgatttcatcatgaacttcactgccgtttttgccggccgcttcaaaaccgatgccgaactctacgcctttaaacgcgttaatcgacagaacggctgcagcgagcttgctgtccagcttacggtcatagtggacataacttccgacaccgacaggcataccttcgacgatcacttcaacgattccgccgatcgagtcgccgtttgccttcgcttcatcaatggctgccatcatttgacggcctgcttcttcatcgtagcatctcaccggtgattcttccgttacccgtttgagatcctcaatggatgtgtaatcggttttctctgcttttacgctgccaatttgcaggacgtgtccggcgactttaatgccaagctccgctaaaatctttttagcgacggctccggcagccacgcgaaccgttgtctcacgcgcggaagatcgttctaacacatttctcatatcacggtgattatacttaatagccccgttcaaatctgcgtgtcccggtctcggtcttgaaatctgacgtttcatttcactttcttcttcttctgtaatcggtgcggcgcccatgatttttgtccagtgagtccaatctttattctctacaacgagcgcgatgggtgaaccgagtgtccgggcatgccgcacgccgcttgtgatcttcgccctgtccgtttcaatctgcatgcggcgtccgcggccgtgccctttttgacgtctggcaagctcaaaattaatgtcttcttcagttatataaagccccgcaggcacaccttctataattgtcgtcagctgcgggccgtgtgattctccggctgttaagtatctcatttctttcttctcccttcatcgcattaacgcttttaagtaaaactataccacaagttttcattaaatgtcttctatcttttttgataaaaaaatgtatcagtgctctcaaggccgaatttttccgggctgaaaatctgctctgtgcttccgacaaacagaattccgttctttttcaggctgcccgccatttttacatacagctcttcttttgctttttcagtaaaataaataaagacgttgcggcagacgatcagatcaaaatcctgttcatagctgtcggcgagcagattgtgccgcttaaaccggatgtttttttgaatctcttgttttacttgataactgttgtcagcctgcttggtgaaataacggcttttcacggaagccggcacctcttgcagcgagcgttcctgatagatgccccgcttggctttgccaagcgccttttcatcaatatctgtcgccaatatatcaaatccggccaaacccgcctgctgactgagaatcatagccaaagtatagggttcctcccccgttgaacaggccgcactccatatttttaacggtttgttatgctttattaacggaagaattgaggtttcaagaacttcccaccgtttataatttcggtaaaattcagaaacattgatcgtcatcctgtccaatgtttcatttaataaaagcttgtctttctccaaagcggcggcaaattcctgaaaatctttgaatccctttttttcataaagggacgtcagccgccttttcatctgtgcttctttgtataaagataaatcaacgccggttatttgtttccacttggtgataaaaatttcgtaaggctccattgcttctctcccaatctcgctgtcttttgtcctagtatagcctgttttctttctaatttgtacgatttcaataaaaaaatcagcccgcaggctgatttgtgagaaatgaaaagacagggcagcgcagcctctgtctttcttaaaatatgtaaaccttttcataacaagagaaaaagaaaggctgacggcttagtacacccagtcggccattaatttttgatacggtacaagctcttcccgtttgaagaaaatgtcaatttcccgctcggcgctttctaaggagtctgaaccgtgaatgatatttttgccgacaaacatgccgtagtcaccgcggatcgtgcccggcagtgcatctttcgggttcgtttttccgatcagctgtcttgtgatctctactacattttccccttcccataccattgcaaatacgggtcctgatgtaatgaattccacaagctcgccgaaaaacggcttccctttatgttcagcataatggttttcagccatctgttctgaaacttgcattagcttggctcctgccaattgtaagcccttacgctcaaatctggataaaatctctccgatcagctggcgctgtacgccgtccggttttaccatgataaaagttttttccataagattctccaccccatcattatgtataggctttcaagttgcacaccgaaatcgtaacatctttctgacaattaatcaatccagggcggagaatgttcacatcttgttcgtaaaaggaatttaaaatttccgtttgccgatatatttggcgatggcggccaatgatgagcgcgcccgtcctctcggcagtgtattcagtttttcaaacgctttttttaagtacctgtcactgacggccattgatttttcaattgcgtctgtgcgtttaatattttcaataatgggggcgagctgctcctgtgttgtttcactgttaattaatttcagctgatttttcaattcaggctgacggagcgcgtacaaaacgggcagagtgacatttccttgcagcagatcccctccgaccggctttcccagttcctcttccgttgaagtgaaatcaagaatgtcgtcaataatctggtaggacatgcccacgtaatagccgaaccaatataatgctttgtgaatcttctcatcagctcccgaagcgatggcgccgagctggcagctgacggcaatgagaagagccgttttccgtttgatgcggcgcaaataggttctgaggttttgttccatattgtatttatctctgatctgttcaatttctccgaggcatacttctacgatggttttggacaggatccggtgggctttcggctcatccaatctcgtcatcatctcaagtgagcccgcaagcatataatcaccggtatacatggcgatacggttgtcccacttggctttgatggtcggttttcccctccgcagctcggcgtcatcaatgacgtcgtcatgcacgagggacgccatatgaatcatttccagcgtcaccgcaacatattttattttattaatgtcatagtcgccgaacatgccggaaagcaatacgaaaacagggcggatccgcttgcctcccgcctggagcagatggagcccggcttcactcagcaagggatagtctgaccgcaccgtttgctcaagttccctttcgatcacatcaatatcgtcatttaaaaaagaataggccattttaaatttcatatcattcacccaaacatctgtatattcatcatttccaaccgatatgcgtagcggccactccgccggtaaacgaatggtatttgacattcgtcaggcccgcttcttcaaacagacgcgcaagctctttcataccgggaaattctcttgccgattcttgaagccaagaatattctttatagctcttcgcaaacatttttccgaagaaaggcatgatgtatttaaaatatagaaaatatgcctgtctgaatccgaacatttccggctgggatgtttccagacatacaacctgcccgcccggtttgacgacccgccgcatttctttcagcacggtcagatagtcgggaacgttccgcagcccgaagccgatggtgacaaaatcaaaagaatcatcagcgaagggaagctccatcgcatttccgtgcaaaagctcaatttggctgtaaccgccctctttcacttttttctcgccgatgctcagcatatttttgctgaaatccagtcctttgatttcgccgctttttccggctgcttctgcgagggcaatcgtccagtcagccgttccgcagcagacatcaagcgcttttgcgccttcttttacattcatgatctgcatcgttttatcgcgccattttttatgctgctgaaaactgataacagagttcatttggtcataatttttatagattttttcaaacacgccgtgtacgcgctgttcttttgactcctgcatgttgattacccttcttccactttctgatgatatgttttgtcctggctgatcgctttgagccggttcagcatgaggttttggattggtgaattgagcggcagcagcgtttcaatgctttgctttgcctttcggaagctatcttccattatgtcagcctttgatttccctgactttacaatattgccgatgacatcgagaaatatagcattgccgttcatcagccgcttatatacaaaaaaatcactcgccagctctttccagcgcggaagattaaagtggtctgacactctgtgaaacagggccgcttccacaatcgccatgctttcgatcaattgattcaagtcattgacagaccgatcgtacagacggattttatgctcattgatttctttaattgccgtagcgagcgtccgaatcatatagatatccttcatttcagataaaagcgaataatacagtccgctgaaatagtcgccggcaagcacggtgagctgccggtttttattttcgtctcgctttaacgctctggctgttgtcacttcatcgtgggtatcaagggcgctttggacaagcatcgcagttactatgtaattttctctgtcgttgttcttaatgtccgcctcttcaaacaaagcgtgaaaaagaagaagcttatcctcatcgattttaggcgcggaaatatgtttcgctaaataaggatgagacagcttttgttttaatttcgtatttagattcgttaaagttccgtagatgtcttgcaaaaatatcacccttgtccccaaattcacatttattctaatatgtatgagatttactcgtcattattatacgcaggtatcattatagcataaaaaaaagaaattggctgtattctcccgccgtttgcgggcaattggcaaaagcgggaaacagccggcttattttttttcgctgttcatttctccgtaagcggtctggatgagggcgttgcctctcactttgatggcagaggtatgctcagtaaactgagcgataatcacttcgcctttgtccagtttttcggaatggtgaaatttcgtatccgtacctctcgttaaaccgatgacgttcacgccgtcctcgaccgctttaatgacgacaaaatcacttgaatgctttgaattcatatctgcaccctctatcattattaatccgcacgtttaatatgttctaacacttcggaacgcgccgctgcgtcatctttaaaaatacctcttacagcggaagtcactgtttttgcgccaggctttcttacgcccctcatcgtcatgcacatatgctcagcttcgacgacaaccatgacgccgtggggatctaaggtctctacgatgctttctgcaatcgttgaagtaatgcgctcctgcagctgcgggcgttttgagacggcttccaccgcccgcgccaatttactcaggcccgtcactttgccgccgcgcggaatgtaggcaatatgcgcttttccgtaaaaaggaacaaggtgatgttcacacatggaatgaaacgcgatatcttttacaagaacaagctcctcatgctcttctccgaaaacggttttaaagtgttctttcgggtcttcatttaatcccgagaatacttccgcgtacatttttgccacgcgtttcggcgtatctaaaagcccttcccggtccggatcttctccaatcgcctctaaaatctggcgaaccgcctgttcaatctgttctttattaacttctttcattgtctgtgtcctccaccattgaatacatttaatttcgattctagcacatttgccgcgccaaaagcaaaacgaaagtcctgcccggtgaccggggctgcttaaatatgaaaagcccctttatcaaggggcttttctgtgaagaaacaaagtgtatgtatcagatgcatacacgatctatattcacaattattttcctgcaacagcgtctttaagagctttacctggtttgaaagcaggtaccttgcttgcagggatttcgatttcttcacccgtttgcgggttacgtcctttacgtgcagaacgctcgcgcacctcaaagttaccgaaaccgatcagttggattttatcaccgtttttaagtgcatctaaaatcgtatcaaaaacagaatcaactgcttttgtagcgtcttttttagacaattcgcttgcttcagcaaccgcattgattagttctgtcttgttcatgcctttcacctcctcccaaaagggtatcaaatcagcagtttattatcatttcttcacagttcagcctgattctaaacctgtctgataaaaaatcaaagcagggaagaacagacaagtaaacggcttttcataagaaaacagacactttgaggaatgtttgtccaacaaagtgaagattttctgtatgtagagtaacacatataaaaagccatatcaagcattttaaagcctcaatcccttgctcgtcaaggttttcacgtgttttaccgaacaaatattcctttttttgcttttttcctcctaatccttgattgatttccagtatctaaaaagaataaaaaaagaccccccgtttcaggaagaggtccttcagcttacaaaataatggcgatcaggccgcctgagccttcgttaataattctctccagcgtttctttcagtttgtatctcgcattttccggcatgagtgacagttttgcggagattccttctcttacgatagagctcaatgatctgccgaaaatatcggaattccagatagaaagcggatcatcttcaaagtcctgcattaagtagcggacaagctcttcactttgtttttctgtcccgatgatcggtgcgaattcactttccacatccactttgatcatatgaatggacggagcgaccgctttcagccttactccgaaccttgatccctgcctgatgatttccggttcatcaaggctcatatcggttaaggccggggcggcaatgccgtagccggtctgtttcaccattttcagcgcatctgatacctgatcatattcttttttcgcgtgggcgaagtcctgcattaattcaagcaggtggtctttcccgcggatttcaacgccgaccacttcttttaaaatctggtcatataaatgatccggcgcatacaaatcaatttctgcgacaccctggccaagttcgattccggccaatccggcgctttcaataaactcaaattcactgaagtggccgacaacccggtcgacatcgcgcaggcgtttaatatcttttacggtttctttcactgattcctggtagctctctctgagccaatgattttctttcagcaccatgacccagctcggaaggttgacattgacttccagcacagggaactcgtaaagcgcttctctgaggacgcttaacacatctgtttcccgcatgctttcaacactcatggcgaggacgggaatatcatatttcgcgcttaattcagctctgagcgcttctgtttccgggtggtacggttttaccgagttgatgaccataataaacggtttgccgacttccttcagctcgtcgatgactctttcttccgcttccacgtaatcgccccgcgcaatatcgccgattgagccgtctgtcgtaatgacgaccccgattgtggagtgttcctggatgacttttctcgtaccgatttccgcagcctcatgaaagggaatcggttcttcataccaaggtgtattgatcattctcggaccgttttcatcctcatatcccttcgccccgggaaccgtatatcccacacaatccacaagacggatgttgacatcaagtccttccgcgacatgaacggacatggcttgattcgggacaaattttggttctgtggtcattatcgtttttcctgctgcgctttgcggaagctcatcctgcgcccgcgctcggtcggcctcattgctgatattcgggagcaccacaagctccataaattttttaatgaatgtagatttccctgtacggacagcgccaacgactcctaagtatatatcgcctcctgttcgttcagcgatatccttgaaaatatcgaccttttccaagtgatcccctcccggacttcctatccttatcatttttcattcaccattctccaatcaaatacaggacactatatgtgtatgacgttgtcctatttcaatatgacatctttagaaaattttcaggcagtcttttctatcaaaatcaaaaaaacctttctccctatttgtatgcgcgggaaaaaggttcattcctgtttcgtttgactttctaaaaaaacgggttcctgtttttcatttacggtgtaagtgactgaaaaggccgggacgaaaggagtctctttccataaaatatcctgaatttccgcgcccggtttgattttctttttgttttccttcaggcagcgggcgagatcgacgcgatagtcggcatagatttctccgtcagcgccgattaaaagcggcagagacgtgcctgaaaccggacttttgactgaaggagagtctttcatgccgagcttttttttatttaaagtgaacaggccttttgaaacagcgtcctcatagggaggatatgtatgcttttcctgatacattttgacacgcagcttcatgtcgcggattgcttccgccatttggagatcgaccagcttgacggtaggcttattttccacatcgacaagcacgtattggtacattcctccgctttcataagctgaggccggcggctcctctatgtatctgggcgcgagccgcttaaaatctatcggatatttttgatagagcggtgttttcatatcttttgtctgaatcggcagaagtccgccgttcgcctttttaaattcatccactgccgcttgcacctgctgaagctgatgtttgtaagatactttattttcagttttttttgcttcagggtacagacagcccgacagcagaagcaccgccattgccgttatgacggccatttttaacttatgcattccgcgcccccttttggctttattcattgacaggcccgctgaaaacgaccattaacacgatcaatcccgagatgaccatgcaggcataagcgagtgaagaaaccgctgcttttatcagtttgtttttcactttgtacctgctgacataaataaaggcgaccgcaacaaacattaatcccatagcaccaagcgcaaaccacattttcatcaatgccacactcacgttcgtgccccccgtcccatcattgtaagcgttatatttcattttaatatacaaatgttgaaaagatcaacaggttttccatctattgaaaaaacaaaaaaactgaagcaaagaggggactttgcttcagtcaagttgactatattcacctgtacgtctgagatacactctcttggacttcgatgctatagtatgcgtagatgcgtacgtctgcatcctcttctgcctaaatcagcaaatgttttaagcgatttcagccggagagttctgcgttttggactttcgtcacttcagaatatgctgacggcatgttattgtcacttcacccggttttcgaatgtgttgaccaagtcttccatctcatgggttttcactctggccattaaggattctacggccgtttctaccttctgcccattaaataatacttggtgaagcgcttctgtgatcggcattttcacctgatatttttgagacagctgatacgcagctttcgtcgtccgcacgccttcaacaaccatccccatcttatccaggacagcttccagcttatatcctttgccgagcaggttgccggcgcgccagtttcgggaatgaacgcttgtacacgtcacgattaaatcgcctacgccggtcaggccggaaaaggtgagcggatttccgcccatctttgtgccgagtctggcgatttcagcaagacctcgggtgattaaggccgcttttgcattatctccgtatcccaatccgtctgtaatccccgctgcaagagcgatgatattttttaacgctccccctatttcaacaccgatcatatcgggatttgtatagacgcggaaatgctggttcatgaataaatcctgaaccgcttctgcagccttgatattttttgaagatgatgtaacagtcgtcgggtgtcttaatccgacttcctcagcgtggctcggccctgaaagcacgacgatgtcttttctgtactcctcaggcagctcctcctccattaattctgaaatgcggagaagcgaatccggctcaattcccttgctgacatgaacaaaaatcgattgtttcgggatatacggcagagcctttttcagcacttcccgaatggcttttgtcggtactgccacaatgatgaagtcagctccttttaaagcctcgcttaaatcggctgtcccgatgatagaacttgatagctccacacccggcaggtaatctttgttttcatgcagttcgttgatttgatcgatcaattcggcacggtgtccccacatcatgacttgatgtccgttatcagccagcactaaagaaagtgcagtgccccagcttcccgctccaagcattgccacttttttcatctctgtatcacacctttttattttcttgctcttgcaaatattttaattggcgtaccttcaaatccgaaagcgtcccggattcggttttctaaaaagcgttcataagaaaaatgcatcagttccggatcgttgacaaaaacaacgaagctcggcggcttaacagcgacttgagtcgcataataaattttcagacgggagccgttgtgcgtcggagtcggattcatggcgaccgcatccatgatgacatcatttaagacatttgtctgcacacggagagagtggttttcactcgctttaataatcgcaggcatgagtgtatgaatccgctttgtcgtcagtgccgacataaacagcaccggcgcataatcgagaaattggaaatgctcccgaatattctgttcaaattctttcatcgtgcgctcgtccttatcaacggcatcccatttgtttacgataatgacgacggctttcccggcttcatgggcgtatccggcgatccgcttgtcctgctcaaggatgccttcttctgcattcagcacaacgccgacgacgtctgagcggtcaatggcttttaacgcccgcagcacactgtatttttctgttgtttcatatactttacccttttttctcattcccgccgtgtcaacgattacaaattcctgctgattgtaagtgaacgccgtatccacagcgtctctagtcgttccggctacgttgctcacgataacccgctcttcgccgagcatcgcattgacaagggatgattttccgacattcgggcggccgatcaggcagaattgaacgacatcatcactgtacttcgtctccggaatgtttttaaaatgctcggcacaagcatcgagcaaatctcccaatcctaaaccgtgtgtccccgaaatcggatacggttctccaaagccgagcgcataaaagtcataaatgttcgctctcatttcggtattatctaatttattaacggctaatacgaccggttttttcgtccggtacagtatttttgccacttcttcatccgcagacgtcacaccttcgcggccgttcaccataaagatgatcacatcagcctcgtccatggcgatttcagcctgctggcggatctgtgtcagaaacggctcgtctccgatatcaattccgcccgtatcaatcaggttaaaatcataattcagccattccgccgaactgtatatccggtcccgcgtcactccgggggtatcttctactattgaaattctttcacccgcaatccggttaaagattgtggattttcccacattcggtcttccgacaatggctacgacaggtttacccatagtacccttcctttcaatccagccgcttacattttcacaaaaaattgttcaaccggttattaataatcatcttcgctatgaaaagaacccttcaaacagaagggcttaactcatttattatatcagttttcactgagatcacaatgtattcttcaaaatgtttcgtattcatgtaacagtctccgtctgttttcaagacatttttgtcgctcctttgccctgctttttgcttttttggctgatgcgcgccgcaagctgttcatatgtagtcagcccgacgagaagaatcactcccgccgaacagcctgatagccatttataatcaccgacggctgctgcccccgcaatgttgcggatgaccgcagcatacaataactccccctggcacatgccgagaacaaaaagacaaagcctctcagggaaccgcccctcaacagaaagcgtaataacggtaagcagtataaccgctgcccattcaggttttatgataaaccaaacagggtcatataatgcaaaaagaaaaataaagccgtacgccgcagccgccgtcagatgaatcacaatatgacggagccgtttatgcatgccgaggcttcccgcataaacaaatgccgcagcaaaaaacatgacatatgccgcgttcagcgtaaaataagccgttatctgatgtatgcttgccatcatattagtcaaaataaagactgatacgtaaaaacggctttttgttttggcaaaaataaaagtcgcaagtatccataaaaaccacattgaccagtaataataaaacggttccataatcgctcctcctctgaccagtatggagcgggaacgcattttttaaaccaattatgcctgaaaggagcggataaaaatgggaaaagacagacaggagaaaaaactgaaagcctcccgccgggtggaatctgatcgcgatgattcaattcaccataaaggagcgacgagccttgaacaaaacggtgaattccgaaaaagaaaatcgtaaaaaacagagaaaggcatgcgggttcgcatgccttttaacgtctgctgaaacgggatgtgtcaattccccgttcagaaagccagtgatgtgtgtcaccttttatgaccaaaggcgccttttgcaattgggcaaccgattggcatccgagggcggtcataatcattttcagctcttgtaaaagcaccgtcatctcgtcaaacagcccctcttctcctttggaggtgagagctttcaggaaagtgcctgccattcccgcgccagaagcgccgagggcaatcgatttggcgacatccagggcactttgcagcccgccggatgcgataattgattgatcagcggagagcgagtggatttccgctaagcttgcggcagtggaaattccccatgtattaaaaaattgaagcgccttctctctgcgcatattttcaatcttagagaaatttgtaccgccgtatccgccggcatcaactgctgccgcaccggcatcaaataactgccgtgccgactccctgctcattccgaagccgacttctttgacaaaaacgggaactcccgcttccgccgcaatccgctcaatacggccgagagcgccggtaaagcttctgtctccctccggcatgacgatctcctgaatcacatttaaatgaatctggagggcatccgcttgaatcatatcaattgctctttttgcctgctcggcatccgcctcgctgcctaaattggcaaatatcagcccgtccggattctcttttctgacgatctcgtaagaataccgttcggagggatcttttaaagccgacatttgcgaaccgacagccagcggcatgccggctttgcgcgcggctcttgccagcgatctgttaatttcgtatgtaagctgtccgccgccgcctgtcatcgcattgataaaaatcggcgaactgcttgtgagtccgccgattttcgttgatatatccactttttccaatgctaggttcggtaggctgacatgaacaaacgtaatatcatcaagccccgtttcccggttttggccggtagacagcgcatgatttatatgttctctttttcgttctgctcgtgtcacgttttatcaccaatttattttaatttattaagcttgtctccgattaaatcgccaagctggaagccggtgctcggctcttctttcgcctggtattgacggaagtcctcctgatcggctttcggcgcttcttcaagctcacgcatgcttaaggaaatgcgctcttcgctttcgttcacgtcaagcactttcactttaacagtctgtccttcttcaagcacttcatgcggcgttccgatatgtttattggaaatttgcgaaatgtgcacaagtccttccacgcccggaagaatttcaacgaaggcgccgaagcttacaaggcgctgcacttttccttcaagcacatctccctgttttaccttttcgccgatctggctccaaggtcccggcagcgtttctttaatagataaagaaatacgctcgttatcgcggtctacggacagcactttcacttttacgtcctgaccttcttccaccacgtcagacggtttttcgacgtgtgaatgagacagctgcgaaatatgaacaagcccgtcaattccgccgatgtcgacaaatgcgccgaaatcagtcagacgctgcacttttccttcaagcacgcttccaacctcaagcgtttggagaaaatcatgctttttggctgtctgctctttttccactacagcccggtgtgacagaatcacccggtttttatcacggtcgagttcaacgacgataagagagagggttttccctttatagtcagtgaaatcctcgacgaaatgagcttcgacaagtgatgcgggaatgaagccgcgaacgccgatatcaacgacgagaccgcctttcaccacatctttcacttcagcttcaaacacttcttttgtgtcgaattttttttcaaggtcttcccaagcgcggtcagcatcaacggcacgtttagataaaatcaaagcatcgtcttccacttttgttactttcaggtcaagctcgtcgtcaacttttacgacatccgatgctttctctacatgaagacttgataattcactgattggaatgattccggactgtttgacattgacaatttcgacatctacatgcttgtcctctacctttgtcacaatcccttttactacatctccaacctctggcacttgaacatcaatttgattcatttcctctgtcatttgaataacctccttggtccaaacctacacagcttaattaatacggtttgaaagctgaacatgtgaatgtccgcttttcagccgaatatgtattaaagaatcatccaaaaaagattttgaatgatcaataaaaagttttattagtattaacttctaataaaaggactggtttgtcaagcaataacatcttgtcttttgaaaaaaattaaaaagcgctccgcccgaagttaacgtgatttctgttcgacgatctccagaatttttcctgcgacttcggcaatgctgagtgacgtcgtatcgatttcaatcgcgtcttccgctttgcgcagcggggaaacttccctctctgaatcgagtttgtcgcgtctggcaatttcttcaatgagcgtctcgtaattcacgtcatagccttttttcttattctcttcatatcggcgcttcgctctttcctctacggacgcgagcagaaaaattttcacttcggcatcaggcagcacgtgagtaccgatatcacggccgtccatgacgacaccgcctttttgtccgagctgctgctgtcttttgaccatttcttctctgacgcctttatgcttggcggcgatggatacttggttgctgacttcgtcttttcggatttcttctgtcacatcttctccgtttacgagaacgatttgtctttccggagcggatacaagctcaatttccgtacgcttcaaaagctctgtaagcgcggcttcatcggttaaatcggcattctgcttgagtgccgtatatgtaatggcacgatacatcgcccctgtatcaatgtacacatatgattttttctcagctactattttagcaacggtgctttttccggcagcggccggcccgtcgatcgcaattgataatttcttgtccataatctctctccttgctctttactcctctatggattgtatcatgaactgccggaaaaggggcgaaaaaattgagctgatttaccgctttaccgtttcaatccattcttttttctccattttatcaactccctcatatttcacagctttcgaaatataaggttcaataggctgataatgaagcaaaaactgcaccgcgcccaaaattataagctgaatgcagaccaatttgaccagcagacgttcaaatgttttcatacacgcgcacctccattaggattagtatggaaaagtgcgctgctgtttattccgacagactgtttcttctctgctgcagctgcgcgcgcatacaatattggagtaaaagctgctgtgctgcggggccgatttctgtaaattcaagcgtcattttttgtttatccgccttttcatcataaaaaatccgctgggtaagagcctcggccgttatatccgccccattttccttgccgggaagagaaaatgagacatacagcttttcacctggttccgcggaaatatgctcaggcatcacaacagcgattccgccggcgctgatattagaggaaaccgtttgaaaagcggtttttttcgcttccaatttgacggatacatccaatactgcgtctgcacggacgtatcggcgtctttgaatccgcttcatttcctcctgagggggatgtccaatccgatcatcgggatgggttcttttttctttcctttaattatgcttttaaattgatacggtacttggccattccccataaattccgctgttatttccaatcctttatgcaaaaagaccgtccgtcccgaatccagatcgacgggatatgagatgtggagttcgccgttttcaacgcttactgctttactcctcgcttttttgggctcattgttctctatgtattcaatccaaatataatctccgacagctatcatggccttcactctttcattatttatgcttttattaaagcatgtaatgaaaaaaaggaaaagacttttagtcctttcctcctttatttttataggtctttatatataggctctgcgctttttaatttttctattttttcctcttttccgtcgtccgcattaatgaacatttgatacgtgtctttcccgatcgtcccgagcatttcgtagcaaagcacttcctgaccgagttcattcgtgatcagcgcctgccgggtctcccgcacttcaacatttttattcagcttcgctttcgcttcatcagctgacaaagcgggagccggaatcgttctcgtgcggtgcgccgccaggtaatcacgcgcggaaaaaccgacgacttcaccatcatccagcgccactttcattcggatggcttccggataaatgcggacgtttttctccacgggaataaaagaaaagacgccgatgttattatattgcgcgctttcatcaatttcgagaccttttgtttcatatccgtttttctttaaaaacgcgacagcccggttagatgcttcattgaggctgatcttttgtttcttcacggcccgtttttgaatcaaatagacaggatgtccccctttttgggtaatatccatatagataaaagatttgtgatccgcgtcattcatgcggatactgtatacatcgcgattcgtcttccggccgcttttgaccactttaatggaataattatgatcaggcgcaaaccgttgtgcgatttttaccgcttctttttccgtaatttgttttcctttcagatgcgtaaaaccttttcgttctgtatttgctcccgtaaatgtggggctgatgctgtcttcagaaaaagcgcctacatttttttcgactgttttaaagctgtcgacgatcgtattatcgctttgttttttgtcagaggcgagcgccatttcaacatccatccaccgtaaatttttgctcatgacgagatgctgaacgctgcgaagctggttttgaatgttctccgcctgtttgtacaggctgttcagtgttgtatattctttcttatcaagcggtttttggtctaaatcccggacggatgttttatagctgaaatctcctatattggataaaaactcctccgtcttattaaaaggcatgagagtcaggggcagctggctcacattgttatgcgcttcagatgtaattctccatacatcaatgagcgccggagacagagattttttactgttcatcgcaagcgtcgtcccgattttgtcgtgaagctgatcaacatggtacgtcagttcatgaaaagccctctgataattattttccgcgtgcagaaggaccgcatctttttcctgatgctctttatatccccagtatccggttgcggcgatcgcgacaccgagaacagcgataatgattcctctaatcatgttaacacctcattttgcgtacttttactcacagaaaatgtgctttccgattcttttaatctgcggacgtccccaaatccatttgcttgtcgccgtatcaggattgaaataataaagcgcgttttcagaagggtcccatccgttaatcgcatcaagaaccgcttcttttgctctttcattcggctgcatgtatatttggccgtcggcaacggcggtaaacgcgagcggttcgaaaatgacgccggccaccgtattcggaaataacgggcttttaatacggtttaaaataaccgcggcaatggcaacctgtccttcaaacggctcaccgcgcgcttccccgtacacagcctgcgccagaagattgatgtcgttgtttgagaaaccgccaggcatattagccgctgtcgtattttgcttttgatttgactgaccgcctgtattgttttgcggcttttgagcaggcttattcgtttccgcaggcttctgcgctccggctctcggttttgtttggttttccaatgggacgttgccataatgagtgaacgtattccctttttggatctgctccattacatattcacggtaatattttgattttgaaatcagcacctgtttggttttcgccccgacgaggccgtcaaccggcttcatgccgaatttctcctgaaaatttctcacggcccagtatgtggtccagccgtaaacaccatcgattttcccgttataaaatccgttatattgaagacgggcctgcaattctataacatcatcacccgtcgcgcctctttgaatcacttgatttgaaaacgcatgaaccgtttcatgatgatcgaagaaagcggcggcgaaagaaaatagaatgagacatgccataaaggctcctttgcacttcatctcttcaagcctcctactgcaaaatttaaagtgtacccgtattgtctgtcacgcggatatttttatacaccgtttccttcttatccctcatcaaggcataaaaaaagaaaccgcacgcgatgcgcggtttcttcacacttggatcatattgacggagcgtgctttttttgcctttcgcagcccgaaccaccataaaaacagcataaacggcagcatataatatacccaatgattgagggcggtaagaataaaatcgtaagaaccgtgcagacatgaaggcacggccagcgaaatcacaagccatttgacacgggcttttttctgcgaaaagcgggcttttccgagataaaatcccataatcactccgatcagcgcatggcaggagaccggcagaagcgctcttataaaagcatgctcaacgccgtggccgaataaatacagaatattttcaagcgtggcaaagcctaaagacacactggccccgtaaacgattccgtcataatgctcatcaaaatgagcatgcgggtacacactgatcatcagaacgaaccatttcaccgattcttccaaaaatcccgaagacaaaaacgaaacgaaaaagcttcctccccccacatgctctttttcaagaacatattggataaacatggtcggaaacacaaggacaaccccgagaaaaaaagacctcagcaccatatgtacaggttcattgtcatactgatcttttaaataaaaatagcttaacagcgcaatgccgggagcaattcctgcagagatgattgcaaacatcaggcaacctctttcctttatattcctatatctatggtaccatgttgttcatatttttacatctttcaattttttaaaaaagagcatatgaatgatcatatgctctctgcacccagccgttttgatatttcgtttgcgatcaagccgccgtgaaaacggccgttctcgataaaaatttcattggcgttatttccagccgcaatgactccggcgataaaaacaccgtcaacatttgtttccatcgtttcttcccggaaaaacggccggcctgattcagcatcaatctgcacaccgattttttcgaggaaaccgtgatcgggatggtatcccgtcatggcaaatacgaaatcgtttttcagccggaccgtctcatttcggccggagcggaaaatgatttcatcttccgtcacttcttcaagacaagcgccgaattccatccggattgtgccgtttctgacaagggcctcaaactcaggcagaatccacggcttgatgctcggggaatactcatgtcctctgtagagcaccgtgacgcgcgcaccggacttcacgagttccaaagccgcgtccacacttgagtttttcccgccgatcacagcaacatctttatcaaaataaggatggccttctttaaagtaatgaaataccttaggaagcccttcacccggtatgttcatataattcggatgatcataatatcctgtcgcaatgatacaaaacggagtgaggtagcggtcttttgacgtttctacaagaaaacggccgtcttcctgtttcgttacgcgctccaccgtttcaaaggcgtttacgcgcagctcttttcttctgacaacctctctgtagtaagagagagcctgtattcggaccggttttctgttttccgtaataaaggcgacatcgccgatctccaatttttcacttgaactgaaaaaagtttggtgcgtcggatagttataaatgctgtttacgacattccctttttcgatcacaagcgcgttcacgccaatttgcttcagatgtatagccgccgataatccgcaaggacctccgcctattataattgctttttcttctgtcatgtccttcaactcctgcgattggcatttccatcataagtttccactcatataaaaaatctcctatattatcataggagattttttttgtttatgcaaacgattggtttatatccagcctctgaaacgcgaagcctcagccattttccgcacgccgaccatgtaagccgcaagcctcatgtcaatccggcggttttgggacatttcataaatattattaaacgattttatcatcatattttccagtttttcctcgacttcttcttcactccagtagaagccctggttgttttgaacccattcgaaataagaaaccgttacaccgccggcgctcgccagaacatcgggaaccagcagcgttcctttgtctgtcaggattttcgttccttccagtgtcgtcggtccgtttgccgcttctaccacgattttcgctttgatgcggtcagcgttttcttctgtaatttggttttcgatcgccgccgggacaagtatatcacagtccagctcaagcagctcctgattcgtaatggtgtcattgaaaagcttcgtcaccgttccgaagctgtctctgcggtcaagcagataatcaatatcaagaccgtccggatcgtaaaggcctccgtacgcgtcagaaattccgacaactttcgcgccggcgtcatgcataaacttggccagatagctgcccgcatttccgaaaccttgtacgacgacacgcgcgttctgaatatcgagaccttttttcttagccgcttcttttatgcagatggtgacgccttttgccgtcgctgattccctgccgtgggatccgccgagtacaagcggttttcccgtaataaagccgggtgagttaaattcatcaattcttgaatattcatccatcatccaagccataatctgtgagtttgtaaatacgtcaggtgccgggacgtctttagtcggtccgacaatctgactgattgctcttacatatcccctgctcagcctttcaagctctctgaatgacatatttctcggatcacaaacaattccgcctttaccaccgccataaggaagatcaataattccgcattttaaactcatccagatggaaagtgctttcacctctttttcagttacattcgggtgaaaacgaatgccgccttttgtcggacctacggaatcattgtgctgcgcacgatagcctgtaaatattttcacagacccgtcatccatccgaacaggaattttaaccgttaataatctgagcggctctttcagcagttcatacacttcttctggataccccaatttttccagagctttatgtattacggtttgggttgattttaatacatcatgtttgtcttcttcattatgaccggtgaatcgatcggctgccatttgagttaacctcctaaaatcttctgtttctctcatgctccctttcagtgactagtatacaccttcaatatctccgtgcatagaagaaagacaatgatttttccattatttcgcttaaaaaaagacggccgctgaaaacagctgccgtttcaaatcttttttatgaaaaatgtttctggatggtttccacagcattgccgtccatgatgagttttccgtactcatggagcctgtaaatcgtaattgtcgccgggtgtccgtattcagccagcaccgcgatgacaccttcggcggaacgggagccgaggtcttcaaggcttacatagtattggttctcataatggtagacggtgccgccggtaatcccgatgcggtgaaggcttccggcaagctgaatgatatcttcaaacgaatggaactgataaataatatccgggctttcgtcaagtttgacctgcatctcgatataatcatcgtcatattcgtcatcttctgcgtccgcgtcatgatttttcgttacaatcacaaccataccttgtgcctgaagagaatatacttccaccgcgatcggaccattcgcttcaaagccgagctctgtatttgcttcattcatcatatctttaaataactggtggactttaaacgagtccttccagaggtcttcttttgtcagtccccgatcagtcagatcgtcgagggttaaaaagattttaatcttattatagttcagacgctcaagccgcataatgttccctcctgcctcttcttgcacacaaatcatataacacagtatatgaataaatgagtcataggttcttaatttgttatcagtttacaccgtgtacagcgggaagacaagcagaatgccgttttttatcaccgcggccggatttgtttcaggaaaacggctcatccggcccgcacagcgtaatcatatgcgtctccggcttcgccccgagcctcagcggaacttttgtcgtcccgtagccgttgctgatcagataatgcgctttttttaccgttcccgccccgcccaattcgtacggcccgaaccggccgaaacggatttggccgccatgcgtatggccgctgaacacagcgtcaatcccgtctgactccctcatctgctcatggatgtcggggttatggcaaagcagaaggtttactttatcagcatccgtatatctgattgcagcttcgtaatcatccatcatcatcctgatatcatccaccccgcagatcgtaacggtttcccctttataagcaaactgaaccgattcatttctcagcggaatcactttgtatgcccgtaaaagtgagagcaatttttgctggctgacctcgtaatcattatttccccacacataaatgacaggcgcgagagccgtcagacgtttgatgttttcttcaattctggcgtaaggaactccgccctccgccaaatcaccgccgagcaaaacggcatccggcttataaactgccgcttcgcggagaagcttttcatcaattaaacggcggtgcacgtcagatataaagaagatggtgagcggcttcatccctttcattttatcaagcgtaaatgtatgtgttttcagatggctgccgtttgccgttttgtacatgacggccgccataaccgcagccgctcccgccaatgagccgagaattcccgctgttagcttcataaacgcactctccattctgtcattgtcttacattagacggacaaacaaaaaaagacgtttctatcctttccggaaaacgcctcattttatttgctttcaaaataaagattgatatcataccgatgtttcatcaagtgaaaaacagattctctcgccctccatttttcaggctggggccataaatccgtgcttttttggataatttcacatctcagtttatgaaattcaccctcagctttttcttccttttttttaaaataataagaagtgcaatacgcaaaagcggaagccataatccagcacaaataaaccgtatggcctaatatttcctgcagaatcagctgcggagaggcttgggggcattaaagcttttaaacatcagcagtatgcacatcagggaaaaacaaacgagggacgcccactgccatcttcggcattgtgcggcataattttcgtattttaatttccgtttcaccagcgcctgaagcatttgtttcgtcggtccgtcagcaaatcggtctaattgcttccataaagaatccatgcgcttcacaccttgtccgttttcattagtacactatatgaaaaacgcggtgaaaacatgcatttattttaatcagacagcggaatgttcagaacctggccggtgtacacgtcgtttccgtttaatccgttgtagctgcggattttttcttcgcccgcccggcttttataatatttcattgaaatgcggtaaagcgtttctttcggctgtacagtatgctgtacggtccgcacttttttcgggacagtcccagcttgatcacttgcggcagccggagccgctttttcacggacagccggcggagactgctgttttgtctccgcgtattcggtgtctgtcggctttacttgtttttctgaggacgtttccgttttttcaggtgttttttcacttggtttttcttttgttttttcagatgcagccgcttctttcttatctttgtcgtcagacttttttttcggttgttctaaaagagcggtttctgacgtatctttctgagcgcctttcggaataacggcaggcgcgctttcactgtggtctatgaagacatcttcatagtccttcgggtcaaatctgctgctgttcgtcatataaagaagaccgaaaaagacaccgattgttacgataatgaacaggacggtcagaaaagtgaacagcggcgtttttgttttggttttttccttcacctgctcttccttttttttacgctcctcttttacagattgtcttgtcgggaggctgtcttcaagatattcaatttgttcatccgcggccgcggcaacctgctgctcggcacgctgctgagcttttcttctttcaactcttgacatttccgtcatgcaaacccctcctaacatattgaaaacggatctgacaggcaaataccgcatcaataataaaatgcgctgtaaccggaacgaataaattgccggtccattcatagataagccccagcaaaagactgatgcccgcaaccatcataaacagaagccacttcgccaagtatctgaaatgaagcacggtaaaaatgaagctggcggcccataagccgatatgtgtctgcagaacgcctctgaacaaaatctcttcgctgaacgaaatgagaagcgtcaaaaacaaaatgtgcagaaccggcctgttcttaaaaagcaatacattaatgccgccgtcatcatataaatgcgaaggacaccatttcatcaccgccagatcggcaaaaatgacaaggacggcaagagttacaccgtaccatatgatattatcgtcacgtatatgccacagctttaaaaaatcgtgaatgtcggtgaaaaagaaaaagccgataacagctgaaaccgccaatatgagcaattgggtggcatacagctgtatcacaatctcccggtctgagagctgctggatcaattcgctttgccgtctcagctgaactcacccgcagactctgaaccgaaaatccggcctaattccagcttccaatcttcaaaccgttccatgtttttccgttctcctttttgctcgtacggagccagatcaagtccgcagctgctgcagcattgtccggtttggccttcaggctcatacgattcatcaaaataagacagcagcgcttttcttatacattctttccgctctaataacgccgaaaaacggttcattttacgcagcttcttttccacgcggtatgtcagttcttcctgcagctgctcttttgtggtttttccttgcagatacagatggacggccgttcgcgcctgtgtttcctggacgcctttattgatcagaacgtcccgaagctttcgctcatcatccgtaccggcatcccgtatgacggccaaaatgccttccagatcataatcagacaggctttctgtctgaataatctgctgctgaagctcggtatcgccgggcgccctcagcaaaatactgacactcgggctgccgtcgcgtcccgctctgccgatttcctgcataaagccctcagccgtttggggaggataaaagtgaatgacaaagcggatatctgacttatccacacccatgccgaacgcattggtacagcagatgcaatcaagctggttatggataaattgctgctggatcaagattctgtcccctgtatccattccgccgtgataataatccgtccgctttcccgttttttcattcagctcagccgcaagctcttccgcccattttctggtcggacaatatatgataccggggccttcaagcttttcggcaagctccgtgagcctgtttattttttcggcattatcagccaaatgttctgccgccaggagaatattcggccggttgactgaataaagatgacgcaccgcatgctcaagtccgagcacatccgtcacgtctctgagcgtttcttttgtcgctgttgcagtcagcgccaatacaggcggctttccgagtgcctgtctgaaaggcccgagcttcgaataatcaggcctgaaatcatgtccccattccgatatgcaatgagcctcatcaataacaaataaactgaccggaacgtttttcaaacggttcagtacataaggtgaagaaagggcttcaggagacatatagagaaatttataccggctgatgttgctgagaataaaatgccgctctgcggaattcagcatgctgtttaatgccgcaacccgcttttctccttttgctttcagctgctgcacctgatcttccattaatgaaagaagcggtgaaataatcagcaccagcccgtccatcatgtaacccgggagctgatagcataatgatttcccccgccggtcggaagcatggcgatcgtatcctttttttggagcacgctagtcataatctcttcctgcccttttttaaaggaatgcaaaccaaaatatctggataaagctttatgcagctcagtcatgctgattcaccgtctttgccagcgccagcctgatctggaaatagctgaagcgcatctgcattccttcgcgaatccgtttaattttatttgtttgatgctgttttgcaaatgccgttatcatacgctgttcctcttcagaaagatactgttctataaaaaatgcaggctgatgcaatgatatttctacgatatgatcttcgattgtggcggtttttaaatttctgaccgcggcgatccgttcaatcggaaaccctttttccaacagctcaaaggtttttctggcagactgtgtcagcgcgctttccgcctgcagatcggacaacagctcgcgcagagcgggatatgcacattgcggaagcgattgaataacataatgtaccgctccccaaaactggacggacacataccattcatcttcgttcagctggagagcgagctgcttattcgttttgccgattctgttgaatgaagttaaagaatagacaaaaataagcgcctgccgttcacttacgccttgcagaagctgaaacagcgcgtcatgcatttggacggaaagctctttagcatctctgtttttccgcatgaaccatttgacccatctcagcgtctgcacatcgttggtaaccgggatatattgactgcattgatgctctttgtttgacaggacttgaatgagcagggaaagccgcctccacaggatgacggcaggcgtttgataatttgcgccgtggcagtgcttcggccaaggccgctcagcaaacgcccgttcaagcctttgaacgccgcgcgcagtcactttccgcgttccctcttcttttccggctgtgatgtatgagttctcggtgagtctatgcatagaagccgcaatatcgccgcgttcacactgtgaagccatgccgaaatatttagcgatctgaaataagccggcatcctgaatggtttgagacgacttttttccttttaataaatgaaacacagcactcggagtccgttcgccgtctattttgtccagacagtcgagaaccacggtatcaaagtagtttatcgccaatctaaacacacctacatttcttttgtgacaagtttcgttttttggttctttttattttaacagattttcatataaatttgacgtttaaagtcatcttttagggggaagtgctaaagagaatcccttatgtgataagcattctcaatcatttttctgttgaaatttgacactaacatcattacaataagtaagaggaataggtgttatatttaaaaatatataaggtaaaccatttgttccaacacgaacaatctgggaggttttattcatggcaaagtacacaattgtagataaagatacgtgtattgcatgcggcgcctgcggagctgcggcaccagacatttatgattatgatgatgaaggcattgcgttcgttacgcttgacgaaaataaaggtgtcgtcgaagttccggaagttctggaagaagatatgattgacgcatttgaaggatgccctactgattcaatcaaagttgcggatgaaccgttcgaaggcgacccgctgaaatacgaataaaaaagccctccccgtgagaggagctttttcgtcctgaataagactccggctgttatcggccggagtcttatttttttgccgatcagcacaaacaaaaaaagcgtccggctgttcttcacagagcggacgctttaagcctttattgtgtttggatgctgcgtttttgttcaatccaaggtttcagcttcgtaaagatgaacgtaaagacgatggtgatgataatgccttttacaatgttaaacggcagaattcctgcgacaaccgccgttttcaactggctgtttgacaatgccggtgaatgtaaaaaccaagtatacgcgggcaggataagaatatagttcaaaatactcatcagcacggtcatcgccgcggttccggccagcaggctcactgcaagcccttttgcagaattgagctttttaaacataaacgccgtcggcagaataaacagcgtccccgcgataaaattggctgcctgcccgacaggcacgccggccatgcttccttgaatgatatactgcagaatatttttaatcgcttcaaccgcaatccccgccgcaggcccgtaaaccaaaatagcgataattgcaggaacgtcactgaaatcaattttcaagtaatccggcagccccggaaacgggaaatttaacagcataagcacaaacgcaatactgctaagcatactgatgacaactaatttttttactttcacaatgctctctccttttcgatcaaatctctcgaaaagaggaaaggttcttttgcgccccaataaaaaaaccgcttttgttaaaaagcgggagcttactaaggcttggcaaagaaacgtttgatataagcatcaaaacgtctgctgaacctccatcttctcccatccagactatactgtcggctccggaatctcaccggatcctgccgccgaagcagctcgcgggcttagagcgtgacgctcatcaccgccggtagggaatttcaccctgccccgaagattgatcttatgaatttattcacattatatatgatcaaattgtaattgtatagagaactgctcaaatttaaataaaatattggggaagcccaatttcagctgattcagcggtttccttttctcctttactgcgtcaatacacattgacactctattgagaatatgataaattatcagatatttagtcagctaaactaggaggaaatctaacaatgtttcgagttttggtctcagataagatgagcaatgacggcttaaagccgctgatggaatcagactttatagaaattgttcaaaaaaacgtcgcggatgcagaagatgaattacatacctttgatgccctgttagtccgcagtgccacaaaagtaaccgaagaattgtttaaaaagatgacttctttaaaaatcgtcggcagagccggtgtcggcgtagacaacatcgacattgatgaggccacaaaacatggagttatcgtgataaacgcgccgaatggaaacaccatttcaacggcagagcatacattcgcgatgatttcttcattaatgagacacatcccgcaagccaatatctcagtaaaatcaagagaatggaaccggacggcttttgtcggggcggagctctacggaaagactttaggcattgtcggtctgggccggatcggaagcgagattgcccagcgcgccagagcgttcggtatgacagttcatgtattcgatcctttcttaaccgaagagagagccggcaaaatcggcgtaaacagccggacattcgaagaagtgcttgaaagcgcggatatcattaccgtccacacgcctttaacaaaggaaacaaaaggattgcttaacagagaaaccattgccaaaacgaaaaaaggcgtccgtcttatcaactgcgcaagaggcggcattattgatgaagcggcgcttttggaagcgctggaaagcggccatgtcgcaggcgctgcccttgatgtgtttgaagtggaaccgccagttgaatcaaagcttcccgaccatccgctggtgatcgccacacctcacttaggcgcttcaacgaaagaagcacagctgaatgtcgcggcacaggtttctgaagaagtgctgcagtttgcaaaaggtctgcctgtcatgtcagcgatcaacctgcctgcgatgacgaaagatgaattcaaaaaaatccagccttatcaccaaattgccgataaaatcggaagtctcgtatcacaatgtatgaaggaacccgtcaaagatgttgcgattcaatatgaaggcaccatcgccaaacttgaaacatcatttattacaaaaagcctgctgtccggtttcttaaaaccgcgtgtagactcaacggtcaatgaagtaaacgcgggcggtgtagcaaaagaacgcggtatcagcttcagcgagaagatttcctccaatgaatcaggatatgataactgcatcagcgtaaaagtaaccggagaccggagcacatttacgttaacggctacgtatatccctcacttcggtgaacgaatcgttgaactgaacggctttaatattgacttaaatcctgccggccacctcgtttatatccagcaccaggatacgactggtgtaatcggacgcgtcggacgcatcctcggcgataacgatatcaatatcgctaccatgcaggtgggccgtaaagaaaaaggcggagaagccattatgatgctttcttttgataaacatttagatgataaagtcgtcaatgagctgacttcggttcaggatattgtttccgttaaactgattgaccttccgtaaccaacagaaaacccaaaacattcatatgttttgggtttttttacgtttaatgggtcggaagcggattaggcgcggcaggcacagcaatcggttttgtcacatcataattaccgattttctttgcgtgcgcatgtgtgaacagcacctcagaataaccgaattccttcgcggttaacaaaagcccttcgatcattaaaatgccttccagcgaatcttcaactttatgtttttcggacaattggatccgcagctgctcgccgtcttccctttccgataccgatgcaatcgcatctgcttctataatgctcgcggtctgtgagcctccgtctgttgtcttcatcccgtcaatagcctgatatactgaataataggtttgttcagacgggatgagatactcttgtcccagactgtcgctgtaagaaaaatacgcccggtttgtctgtttatgtacggacatctcagcggaaatgccgtaagatttataaaaatcctgtccgtctccgttttgaacctttttcaatttaatccgctcgtaaggactccatgtcaaagtctctttcagcatctttttcaataaatcagaatcggcagctgattcgatagaaagacgtccgtttacctgcacaagcaaatccttcttatccgccgttacctgcacaccgtccaaaaggttcggcacagagaggaaagattcgggcacttctaagtttcctgcatcagataatgcctctgaaaccgattcgtcaggcttctttttttcaaaactgaccggaatgacggcggatgtatctgaatcggcaaacgccaaagtaatgtaattgtttttgttttcgttagaaacgacaaacgtcttctgatccggcttgacagcagctgactgactggctttttcagcttgaccgctgtcagctgtaagatcaccggcagatttgtttgtcatcaggtgaggagaaataatcagagcgatgcacaatgcgcagatgccggctgcagcggggccgatccagcttcgggccggttttttcctgtacggtttacccgtttcaatattccggtaaatggcctcgggtgaacgatgatctctaaccgccggaagttgtcttaacaactcctctactctttcttcgttccaatatgacttcatcatccattagctcctccctcaaaagctccatctgtttccgaagtattttgagccctctgtgttgggtcgttttgactttgctttccgagaagcggagagcggcggctgtttcctgaatggaatatccctgaataaatctcaagataataacagctctttgatcaatggtgcaatgatcaagcgcggtataaatttcccggacattttcatgctgtacggcgagttcgtccggaagcaaatgctgatctctgacatcttgtgtatcccaatcaaacgtacccataatacgctgtctgatcgtctgctgcttgcggaaccagtcaatcgccacatggcgtgcgatggacaacagccatgttttttcactgcttcttccttcaaatgtatgataggaattcaagacgcggatatacacttcctgcgtcaaatcttcagcctgcgacttatcttttaccatataaaataaaaattgatataaatcttgatggtatgcatcgtataatatctgaaaggtttcttccatgggaaacccctccgttcacttttttgtcgtaaaaatgcgttgaaaagttacattacaactatattacgagaaactggaatttggaagggaatttatattaacatattcttaaatttttaaaggagaaaaaaacaaaaaacacccgcatgttctgcgggtgtttcgtatggaacaagattgttcgtcaatttcagacgtcatcctgcgcttttgtcggaatataaaatgtaaacgtcgtccctttgtcgatgctgctgtgaaccgcaattgagccgccgtgggcttccacgatattttttacgatggcgagtccgagtccggtccctgccctgcctcttgttcttgctttgtccgctttataaaaacgttcaaaaataaaaggcaggtcctcttccggtattcccgagccggaatctttgatatcgattttcagtccgtcttttacggtatgagccgcgatatgaacgtttccgcctgactccgtatggcgcagcgcattatctataaggttggtaaacacctgttccattttgtcttcgtcaaagacacactccggctgagacaccgagatgtcctctgtgagcgaaacgcctttttccttcgctacaccggaaaatttgcgggagatcttctccagaaattcatgcaggtttaccgtttcatagcgcagacccgtatgtccggattccattctggccaaatccagtaaatcattgacgagccggcccatacgaagagattcatcataaatgatctgcgcgatttcttttttctcctcttcggtgcttgcaatgtcgtccactatcgcttcactgtatccttgcagcatagaaatcggggttctgagctcatgactgacattggcaatgaagtcttcacgcaatttatccagcctgcgctcttcggtcatatcacggagcacggccacggcgccgcggacgtgtgattccgcataaagaggcgacatcaataaaacccatgaccttccttgaagcgtcatttcaatcatttgctctttttccgtgttcactgcattttgaaacagctcttttgcttcagggggaaggttgtctccttctttaatgttcatgttctgctcataataccatgcctgcagaaaacgttcggccggcgggttggtcaccaaaatggtgccgtcgatattaatggtgatgaccccgtctgccatactgcttaaaatattggacagctgttctttttcctgattcagcgcgttaatatggaaattgagctgccgtcccatctgattaaaggcaatggccagttccccgatttcatcttgggtcagaatcggaatttttgtatcaaactttcctttcgccaagtcttgggcgccttcccgcattttccgaaggggatatgtcaccctgctggataaaaagaatgcgaaaaacgttgtcaagacgatggcaatgcccgccgcaagaaaaatatagcgtgtcgtatgtttcgtcgtatctttgacggcaagcagcgattgggataaaaagaccatgccttttttgccgtctttttcatagggcactccgacgatcagccgttcattatccgaaccggcatttttggggaccgcgcgtttgcttactttattgcggtctgtcagcgccttgtgcagatcccggtcatgtttaatctgctctaatgtaatagaggataaatgattatcgtcattgggcgaataccagacatgcttatcatcctgaatgatcgcgatgctcgttaaattgtccgccagttcccacgtgatggatctggcaagcggctggtcttcatgattttctattatgaccgcaattttatcggcaagctgcgttaaatctttttccgcttcttcaacgtggtaattttctataaattccagaagcagcaccgttaaaataaataaaacaattaacacgagtgaaagaatggtaaaccaaagctttcctactacgcttttccaaaacttcattcagcgcctacctcaaatttgtatccgactccccagacggtgacgatttttttcgccgctcccggagacactttgtttaatttttcacggagccgtttgacatgagtgtccaccgttctgaggtctccgaaaaattcatactgccacacttcttttaaaagcttttccctgtcgtacactttgtccggtgttttcgccaggaagtacagcagttcatattccttcggcgtcaggctcacctccgtgccgtccgcagtcaccctgtgagcatcatgatcaatggatagatgcgagaagacgagtacattttttgtcggggtattggctgtcagataagatgtttgggaagcccttcttaaaagcgcctttacccgaagcaccacttctctcgggctgaaaggcttgacgatataatcgtccgtacccgcttcaaacccttggacgcggttggcttcttccccttttgccgtcagcatgataatcggggtcgcttttttttctctgagctgccggcatacttctattccgtccgttcccggcatcattaaatccaagagcaccagatcataatctgatgccagccccattttaatggcctcgtctccgttttccgcttcttcaatcacatagttttcccgttcaaggtacattcttaaaaggcgtcgaattctggcttcatcatctactactaatattttagtttcatttgtttgatccatcgttttccccctgctttccttctgttactttcattttaacaaactgtgcggcagcttgagaactgtatcggctttttgcatctatgcgtacgaatgaagtccggcaagcacgagattcacaaaaattaagttaaacataataatggcgaagccgatgacggcaagccacgcggacttttcgccatgccagcctcttgacagccgcaagtgcaaatacgctgcgtaaaataaaaaggtgatcagcgcccatacttccttcgggtcccagccccaaaaacgcgtccatgcaagctgcgcccaaatcatcgcaaacacaagcgcgccgagtgtgaataccggaaaaccgatggaaacagcgcggtagccgacttcatcgaccaagtccagattcacatttttgacgagcgggcttataagagcgctgattctctttctgaatatcagcctgagcgccccgaataaaacgagacctgcgccaaacgaccagatcaccgtattgacctttctgcctgaaaaaatggccggaagctcaataagcggcttcattgcgccttccgtaagcagttctccgtcatgcgggccgacaagcgcaggcatatcatatatcatcacgcttttagcctcttttttatccacccaattaaattctgctttgtagtccgccagccggaatgccgacgtgacggcgataaatgccacggtcgtcacgagtataaacatgatgacttcaagccagaacgtttttttgcccggtctggattggtcgacatgctttaacaggaaaatgacgccggctacaaaactgatcgcaagaatcgcctgcccgagcgccgcagtcgtgacgtgaatgtacagccaattgctctgcagtgacggaataagcggcgtgatgtctgtcggaaacatgcttgcatatgcgataagcaaaagcgcgatagacaatgtgaacatgcctaatgaaggcagtctgtaaataaagtaaataataataaaagcgagaacaagcatcatgccgaatgacgtcgtaaattcaaacatattgctgacaggcgcatgtccgcttgccgaccatctcgcaataaagtagccgaggtgacaaagaaatccgaaaatggttaacgtgattccgatagccgaccagcggcccttaccgtccttcgcaccttttgttccccggatggcgccgccgaaaaccgggacggcaattaaataaatcaaaaaggcagcataaagaaaatttgcgctcagctccgccatgacaccactcctttttcactaggcctgatttttggccaattctttttgatcggccggctcttgaatcccggtcccgctaagaacaaattcgatatcctttttcagaccgaaccagtttttgttcgtatgtcccgccacaagcacttcatgatcacctgttttgatccagatccttctgtgctgccagtacatcccttgaatgacgccgatcataaagatcgcgccgccgacggcaagcacccataaggttaagtcttttctgacggtgagtcctgtaatgtttttcgtttccacatggtcgaattttaatttgtacttgttactttcggaaccttcaacagtctgctgaatcgcaacaaaacttttctcccctttcggcttgtcgggagccgtgattttaaagacaaaagccggattgttaggaaccttcgtcttcgtgctcggttctccgtctttgttaaaataaaaatcaggaagataactggcaatctgcactttgtaaccgttaccaagatcgtagtccgtgtcgggatcaagaagattgatcttcagtttgccgaatgactgttttgttttttggtcgatcagctgaaataccatctgatcgagctggttttctttatagtccacctgatacacagaataggagtcaaagcgcagcggttcattgacgcggatattgttttctttgactcttttaagcttcggcttttcaccgaatacaatgtcgccttccctcttgtacagaaccgcgtccgttgtgaaggatttggcgactttgccgtttccggctctgtcaatggcgtcggcgaatacttttttctcagtgtctttgttatatgtctgcatcgtgaaccggttgttttttaagtaatatttgccgtctgtaccggggatctgggcggtttcgccttcacggacccagagcgtttcatcgacatacataccgggtacaaatctcagcatggctccgatcagaaaaatgatcaggccgatatgattgacatagggtccccaccttgaaaaacggcctttttccgccaggatgcttccctcttgttctcgcactctataatgcttttttttcaatcgtgttctgaggctatcagccgcatccccgctcagctcggtttctgtccggctgtatagacgctgcctcttcaaaaagaccggattccgccgaactccttgatttttaagcgccctgtacaaaggaatcacccgatccaggctgcagatgaccagtgatatgccaatggatgcgatcaggagcatataccaccatgagccgtacaggtgatgaaaccccagcaaataatacagttggccgattatgccgtactgctgttcataatatgtatccggctgggcgcccggaggcagataagcttcctgcggaaaaaccgtgccgaaagcagacgccgccagagtaatgacgatcagccatattccgacttttacggaagaaaagaagttccataccttatctacgattgttttgttatatgtttgcgaacgccttgcgctgccgtcgtaccgcatatcggcaagcggcgatttttgatcatcaagcggcttcccgcacgactcgcacaaaaccgtcccggctggattcacgtgcccgcactcacatttgacctttttcatgaagacgcctccggcttaattaaattcatatagtcatgaaccatgcgttctgtcatcgtgccggtcaccactttcacgacctttccgtcgggattgatcaaaaatgtcgtcggaataggtgatacgccgtacgcgtccagcacttgccggtcagtatcgagcgcaaccgggaaattgacgccgtatgttttcataaaattatgtactgcaatttttgattcgccgacatttaccgcaaccacctcgacaccgaggtctttaaaatgcttgtattgattctccatgtagggaaattcctgcttgcacggctcacaccacgttccccagaaattcagaaaaacacctttcccttttaactgactcagttctatgagtctgccctctgtatctttcagcgcgaaattcggggctttggacccctcagatatacgctctccgtttgtgtaaacggcattatagatggtatatccgagcgcgcagagtaagatgagaaggatgccggtccgaatgaataaacgccgccgttttttgttcattgtacactgctcccctcccctgtctgcaaatccattcaattatatcatctacacgttttgtaatttttgaaggttatgtgaaaattagaaagcgtttttaccgtgttcagctaaagcccgcagccttttcacctcatgcggcgtcaattctcttgcgtctcctgtgcgcaggcctcttaaatctaaaaatgcgtattcttcacgtttgagtttcagcacgtcatgaccgatcgcctcaaacatgcggcggacctgtctgtttcggccttcatgaatcgtcagctgaataatgctcgtctgctttcttttgtccagggaaagcattttcgctctggccggcgccgtcttgccttcttcaagctgaatgccgcgctcaagctttctcagaagttccttggaaggaatccccttcactttggcgacgtacgtcttatcaatttcgtatttcggatgcatgagtttgttggcaaactcgccgtcatttgtcagcaataaaagtccgctcgtatcataatcaagcctgccgatcggataaatgcgctgcggcacttctttgaaaaagtcggtcaccactttccgccctttgtcgtcatcagctgctgagatcactcctctcggtttataaagcagaaagtacacgggttcttcccgctccacctttaatccgtttacttcaatctgatcagaaccggtcacttttacgccgagctctgttattacttttccattcacctttacttttccttcttttatcagctcttccgcctttctgcgtgatgccacgccggcatgagcaataactttttgcagtctttccatgtcgttcacctcaagtataatcttacttttttccccttgaacaaacaagctttttcaaggagagttattctgatatataaaaagcgcctgatttcaggcgcttccaaataataacgcaactatgatgattgatgcaaccaccccgatcagatcagcaagaagaccgacctttaaagcatcccccatttttttgatgccgaccgccccgaaatacaccgtcaggacatacagcgtcgtatcagtcgatccctgcatgaccgaggccagtctgccgataaatgaatcaggcccgtacacggcgatcagatctgtcgtcatgccgagcgccgccgtccccgaaatcgggcggatcagagcaagcggcacgacttctgcgggaatgccgagcgctgtaaagaaaggcttgcacagccccatgacaaaatccagcgcgcctgaggcccggaatacggtaatcgccaccagcatcccgaccaaatacggaatgatggaaaacgcaatctcaattccttcttttccgccttcaacgaatgattcatacgtcggcacttttttgatcgtgccgtatatcaatataccggcgataataatcggaatcatggctaaagacagccaattcaccatttccattcgcttacctcccttttcttttgcggcggtaccagaagtagcggtcaatgaaaatcgcgccgattcccgaaattaaagtcgctaagatggtcggcccgacgatatcggtcggtgatttcgccgaataagccatgcgcacggcaatgacggttgtcggtatcaatgtaatactcgaagtatttaccgccaaaaaggtaatcatggaacggctggcctcagacttacctccattcagctttttcatctgctccatggctttaatgccgagcggtgtcgccgcatttcccagtccgaaaaagtttgccatgagatttgataagatgtaccccatggccggatgatcagggggaatatcgggaaacagcttagagataaacgggcggcacattctgctgaatatatccaaaaggccggactgctcggctattttcatcaggccgagccagaagacgagcacgctcattaatccgaacgagatcgtaaccgcttcttttgctcctttaaaaacagcttcattcacatcctgcaaggtaccgttaaacatcgcaaagacaagtccgattaccgtcagacatacccagattaaattgaccatgacgaaccgcccgccgcgctcataaacaggctcgtaaacgtctcaatgaaatgctttttcggttttttatggcgctcgttttcataatagacgggaatcttggcgatcactttcccatcatgcataacagtcatccggccgacgacatcaggaatgagagaggcgtcctttttccaggcttttttcggttttattaaggttgtgcggatttttacatcgtcgatttcatcctcttttaataaatatttgacatcccgggcaataaaagcgtgttttccgtaaaacgtctttttcagcttcggaatgccgccttttttagcgacgacataggttttatagtgttcaaagacataattaaacatattcatatggtcatcccagtcatccggatcatttatggtgaccgcgatgagatccgttccgtcttttgaagccgtcgaaacgagcgtccgtttcgcgatttttgtgtaacccgtttttccgcctgtgctgtaacggtagagcccagtcagaagcttgtttttatttttccatacccggtccatcgtttccgccttatacacttttgtgcctgaaacggtccggtattccttgattttcattgcgtatttagtcaaaagcgccatgtcatacgccgttgaatataaattttcatggtcgtccagtccgtgcggattttgaaattttgtattttccatcccgatttgctcggcttttttgttcatcataaatacaaaaccgtcaaggcttccgccgacatattcagctattgccgcagcggcgtcatttcctgatctcagcataagcccgtatacaagatctttcagctttactttttgtcccggctgaagataaatggctgagccttccgtttttacagcattcggggaaaccgtcacggtctcttccatctttcctgattcaatcgccagcaccgccgtcatgattttcgtaatgcttgcaatccgccgcttatgatgttcatccttggcgaataacaccctgccagatgctccgtcgataataatcgcgctttttgcgctgacatgtatttgggcatgtgccgtattgccgtctgtaatggaaaaaagaataacaaaagtcaaaagaaatacggcagcttttttgagaaagcgcatgaatgctcacgtccttgttgtgggtttgtacaagtttatgcgcctgtccatgacttatgaataccaattgcatcactttcacataaaaaaactctcccaaaaggaagagtttttatctgactgatgccatatttgagcctgatgcttcatattgcgccaattcttcccgcatccgcagaaattcactgctgagcgaaagcagaaggctccgcagcgagtccggcacttgctggtagaactcaatcgcgctttggcctgtataagcggcgcggctgttttcgtaccatgtatccttttttggcatgaaaaattcttccacgcactgatgatacactttatacagcgttttttccgctctcacctcatgaaacggctcctgcattaagagccgccggcaggcttcctgggcgccttcgcaaaagacggtcatcctcctcagcacactgagcacgtcgcggcagtatgcctcatccgcctctccttgagcccgcatctccggcaatgttgtatgatttaaatagctgctgaccatcgtgacaacctcggctaaaaattcaccagtttcttcagtatgggccctcacaatcgaatttcccatttccgtccgtttccttcctctcttgtacgtcgtcatttgcgtcattcatcaatggcctttccctactatcgtatgatgaaaaacgattattatttaatatcctcaaaagtttggttgaagttttcaaagaataaatcggcttcctcctggagaacgtcttcctccgcattttcaggaagcggcgggagctcctccaatgtttttaagccgaattgttcaagaaataccggtgtcgtgccgtataaaatcgcccggccgggaccgtcggcgcggcccacctcacacagcagcgcttttgacacgaggctgtgcagaatccgctcagacttcacgccccggatatcttcaatttccgcccgtgtgatcggctgcttgtacgaaacgatcgccagcacttccaaagaagcctgcgacagcccttttgacggcacttcgattagttttttcaaataaggcacgaattcttttttcgttccaagcatatacgtatccgcatattcggtaagctcgatgcctctgtcgtcttccttgtactgagcggccacttcttccatgattccggccagttccgcttcttctatttcaagcaccgtcaccaattgctttttggtcagtccttcatcacccgccgcatacagcagggcttccacaatcgctttccaattcacgatatcaaacgccatgaatggattcactccccgtaatgtatatatctgaaaagttttcttcctgttcaatgataatctgctgatttttcatcagttccaggactgctaaaaacgtcacgacgagatggtccctttgccgagaaggaaaaagctccgtgaagtttattcttctccccgccgtttttaagctttttacgatttctttcattctgtcttcaatcggtatttcctgtcttgtaatggtcgtttctttcggccgcgtgatttttttacgctgaagcaccttttgaaacgcgccgatcatgtcataaacggtcaccgacagtttctgctcggtctgtttgatttcttttgcatactcacttaaatcactcggcggctttgtaaatgacttttgtctttcttcttcccgctcttttaaatccttcgcagcggttttatactttctatactcaatcagcttttcaatcagctcgtcccgagggtcttcttcttcaagcatttcgtcttcaaacagctcttcttcttgtttcggaagcagcattctgcttttaatgctgagaagcgtcgccgccatgaccagatattcactggcgacatcaagttcaagctcttgcattgtatgtacatataataaatattgttcagtaatggttgccacgggtatgtcatatatgtcgatttcaagacggttaatcagatgaagcagcaggtccaatgggccttcaaacgtatcaattttcacttgatattctaccattatctcaccattttcagtatcactctcattgccggaaaaactggctaccctttagtataatccaccgaaatgctctcgtccaatacttttatacacgtcctccgttatttagaaaatactgaaaaagaagatatacgcctatacctttaaaggcggatgcacataggatagccgtgtaaacttgaaacaaagggaggctgatttcacatgagcggagcttgtttcggcggaggttttgcattaattgtcgttctgtttattttgctcgttgtcgtaggagcatcttacatctgctagttcctcaggcttcagacaccaagccgctcttttttccttttcaaagcgctgtggtacactggttttagcataaaaggaggaagcggcttgtatcctaaagcttatatcggctttttggccgaatttcacgcatcaagagattattttgaatgtcatgaactgttagaggaatattggaaagaaagcccggctgaaaagcggagcattcattgggtcggcctgattcagcttgccgtcgctctgtatcaccagcgcaggggaaatgaagccggggcgaaacggctgattgccaacagcttacgtattctccggtctgaaaagcaggcggtctgttctctcggtctcagccatccgaagctgattgagctgatagaaacgctgtcagacgatatagaagcgggcctgccttacagaagtgttatgcttccgattacagatgaagccctgaaagaagcatgtcttgccgaatgccgccgaaagggctatacatgggggcaagacggcgtatcagatacctttcttattcataaacaccgcctgcgggacaggacggatgtcattaaggaacgcgaacgggaaattgagagaagaaaaaaaagcagaggctgacggtcagccctgctttttctatatcaaaacagctcccgaaaccgtgaagattccgggagcatttgtcagttattatatgagatatcctgatctttttgatgttgacagcgttcaaaaaagctttgcgttaattcattcggaacgagtgcctccgttttgaacagacgttttaaggcgtccatcatttgctttccgattccttgatggcggtgagaaggattcacgctgatatgccggatttcaacctctgagtcctttttttcgactccgatcgctccgacgatatcttcatcctctttccaaagaaagagctggcggccagtatccgtttcatagtcctttattgtctgctgaagctgcttgagatctttttcattcggcataaatgacagaagacccatcgcaatcttttcaaacgattttttataacgaattaacataaaaacccctctatatccaaaatgtccattcatgtcctatcaaacggatacataaaggcgatccgttttctcacattatatcattttcgccgcggttttaaacgcttttcaacaaattattcaaatgaacggtttaaatttgccatttcaatggcagatactgcgcaatccgctcccttatttccggcttttgttccggctcgttcgatggcctgctcaatggtttcagtcgtcacgatgccgaagataaccgggacgcccgtcgccgttcccgcctgggcgatgccttttgccgcttcattgcagacatagtcataatgcgttgtcgctcctctgataaccgtgccgagcgtaatgacggcatcgtattttttcgtttccgccattttctttgccgcaaacgggatttcaaacgctcccggcacccaagcgacgtcaatgtcgtttgattctacaccgtggcgaagcagcgtgtcttccgctccgcttaacagcttgctcgttataaattcattaaatctgccgacgacgattccgattttaagtcctgttcctactaggtttccttgtatgatattcatatgttatccatccttttttgtgagatttgtttttagaaatgaagcagatgtccaagttttttcattttggtctgtaaatactgcttgttatgctcactcgcttccatttgaagcggcacccgttccgaaatgctgagaccgtatccttcgaggccggcgattttccgggggttattggttaaaagtttcatatgctgaacccctaagtcgcggagaatctgggcgccgatgccgtagttgcgcagatcaggcagaaagccgagcgcttcgttcgcttcaaccgtgtcgtacccttgttcctgcaatcggtacgccttcagcttattgattaaaccgattcctctgccttcctggcgcaaatacaatagaacgccgcggccttcttcagcaatttgcgcaagcgcggcatgaagctgaggtccgcaatcacagcgatgggatgcaaacacatcgcccgtcaggcattctgagtgcactctgacaagaacgggttcgctgttaaacgggacatcccccatgacaaaggcgagatgttcttttccgtcaacctcgtttgtatatccgtaaactctaaacgtgccgaagtcagtcggcagcgtaatatcaacttctctgttcacaagtgtcgtaatgttgtaacggtactctattaagtcttttatcgtaatcattttcagctggtgacgttcggcgatttcggctaactccggcactctggccattgtgccgtcttcattcataatttcacaaatgacgcccgctccctgagatccgcaggcttttgcaaggtcaacggctgcttccgtatggcccgcccgcttcaggacgcctcctttttttgcgattaaggggaaaatgtggcccggacgctgaaaatcgtcagacacagattcctcgttcaacagcgcctgaatggtaaaagaacgttcttgagcgctgatgcccgtttttgtcagcctgtggtcaatactgaccgtaaaggcggtctcatgtgagtccgtattatgatcgaccatcgggtgaagatccagccggccggcgatgtcttcagacagcggcgtgcagatcagacctctcccatgggtcgccataaaattcaccacttcaggcgtggcatgctcagccagcgctacgaaatctccttcgttttctctgtcttcatcatcgacaacaatgatgacttcaccttttttcagcgcctctaacgcctcttctatcggatgaaacatatcgatcttcctttctaaaagccgttctcgcttaaaaaggcttccgtgatagtttgattgcttttcgtttgttctgttttgtgcaaaaagcggtataagtatttgccgatcatgtcacactcaatatttacggtcgatccgactgttttcgtctgaaaaatcgtttctgagatggtatgcggaatgatggataccgtcacgctttcatctgatagaccgaaaatcgtcaggctcacgccgtctaccgtaattgaacctttcaatacgagcgtttttgtcaattccggcgaaagttttaaatcgtaatagaccgcgttgctttttttctcgatccgcgtaatttccgccgttccgtccacatgccctgatacaaagtggccgccgaaccgtccgttggcggacatcgctctttccaggtttactttactgccttttgacaagccgttcagcgaagtggatttcactgtttccggcatgacatcaaccgtaaattgattgtcagaaaatccggttacggtcaggcagatgccgtttaccgcaatgctgtcgccaagtttcacatcacttgtcacttttgaagcggcgatggttaatgccatggaaaggcctgtcttttcgattgcttggatcgtgcctgtttcttcaacgattcctgtaaacatcgtcaccatcctttccatctttaggtatggccgtcagttttatatccggcccgatttgggtgatttgtgtgaattgcaaatgggggacatctttcattgattgaaaaccttcaccggagatcaagctgggagcaagcgttcctccgattaatttaggggcgaaatagaaatgaagctcttggaaacagccttccttcacaaaacttccgtgtacggatgctccgccttccacataaacggacattattccgttttcagcgagaacactgagcacctcagggatgtgaatgcggtctgtttccagcggaaaaacttttattccgagtgcggtcagccggtctttcttttgcacgtctgcacctttggccgtaaatatccatgtcggcgcagcgccgtcagtgagcacatttgccgtttcaggaatggtcagctttgtatcgagaatcactctgaccggctgcttcaccgcatcaggaagcctgcaggtcaggctcggattatcggctttgactgtgcctgctccgacaagaatgctttgatgcgatttcctgtattgctgggcatcaagccttgccgcctctgatgtaatccatttgctgtcaccggtttcggtcgctgttttcccgtcaaggctcgcggccgctttcaaggtgacatacggaagtccggtccgcatgaagtgaagaaacattttattcagctcttctgcctgctgcctgagaaggccggttttcacttcgatgcccgctgcttccagcattccgatgccttttccggctacaagcggattcggatctttcacagcaatgaacaccctttttatccccgactttattatcagttcggcgcatggcggtgtttttccgtaatggctgcaaggctccagcgtcacatacaaatcggcgccttttgcgtgtctgccggccatattaatcgcgtgaacctcggcatgcgcttctccgtattgcaaatgggcgcccattccgacgatctgtccgtttttgacgacgacagcgccgacaagaggattggactgtgtctgtccttcaccgcgtctggcaagttctattgccgtattcatataatattcatccattgttatccctcccttcttccacgcaatttggcgtcaaaaaagccccgaatgtttacacagttcggggctttgccagttttaatccataggaaataagactatacagtaagtttattttttgcatagcttctctcatccttctcccatccagactttcactgtcggcttcagcttttcactgaatccaccgtatacagatgcatacgggtcacgggctgtaaagcgcaaagcgccttattaccgccggtcgggattttcacccagccccgaaggatacaatcaatatttttttgtccttatccgctattataacatcctttgcggcaggcgcaatgaatttgcacctcattattcagaaaaataaaaagcgcccttttcccataaaaggcgtctttatttattcgttcactttgacgaccttcaataagccgtcaatccggtttgatttgctgaaatacgctttaatcttatcacctttttgcacatcggagagatcctgcttcagcttgtcgccgttaaaaataatttttgtgccgttcgctgccgtaccgtggtactcagttccttcgattttcgtaattttatatgttttgactgtatattcttctttttcctgggacagggtttgtccgattgcagtcggcacgtctttcagttcaatatcgtttatgaccatataaccgcccgctaataacagcagcagtacaagtaaaatggctgcttttgttttaattcttcccatttttctacctccagcccgtatcaatctattcattactatgtcatattcctttttttcatgaatagaaaaccgttcttccctgcgtgagttattcatataacgtttcataaagggaagatgtttcatgtatctgtaaaactttctatctattaaatagatatacgaatttatgttctgtttttgagggtggagagataaatttatataaaaaaagcagttttctcatgaagaaaactgcctgtacggtttatttcgtcttgcgaatttcgttaaacgggaagaagacgaattttgatgtgcccgctatttgtttttttgtaaaaagaccgaggccgttgcggctgtccatagattctctgcggttatcacccatgacgaaatatttgtcgtccggcactttcaccgggccgaagtcttctgtcagccggtcatagccgtcttgcttcgccttgtgcttatttgccgctaaatacggttcggacacttttttgccgttgatatacagctgatcgtttttcatttgcaccgtgtcgccgggaagtccgataatccgtttgacatagtgctcattttctccgttcagcacgacgatctggtcgcgtttgaagtcgcttatgtatttgaccgtcatattgacaaagattctctcgcggtcatgcagcgtcggatccattgatctaccatcaacgagataaggggcaaataaaaagtttcggatgagcagtgccagaacgacagcgatgataatggctttcgcccaatcaagtacggcgctttttttagaagttttttctttttctgatttcaagtgatttcctcccattagccatggtcatttttattttaccatgaatccctgcacagagggcaaataagccccgcaccccatccctttttttcattttataagccggatctgctgattttacggtatttcacgaagcttccgatccgccaaatgcacaaatacacaaaagcaagctccatcgttaaaacggcgaattcagccgcgtcaatgcttttgaaatattggctgagtgcgatacggatcgcaataatcgcgataatgacatatttaaagtttttattccgcttggagtagacaaagccgtcttcccggatttcataggcggtttgcgacagcatgatgataccgaataccgcgcctaacagtccggcgatggcgagctcccaaagagcgggaaaatgaaacggctttcccgggatattcatgagctggctgatactgaatgtaaaaatgacggcgataatcaaaagcgggagaatgatgcctaagccgccgcctttaatcggcctgtttcccttttttaccctgaaccaaatcataagtgcgagaatgataatgacaaataaaacggttgccaattgaaccaacgtttctacctcttttcattgttgtaatcggtctttttcactataccagaatgatcaccgatgttcatatatgtattttttcatgatttacacatgagaattttcatatacataaaaaaaacccgcctgaaaaaggcgggttttccgtcattatccttctacacggatttctttcattttgtctccgttagacatgtttttcgcatgctctaaaccgcttgtcacttttccgaatacagtatgaacgccgtttaaatgcggctgcggctcatgtacgatgaagaattggcttgaacccgtgtctttaccggcatgcgccattgataaagaaccggcttcgtgtttatgcggattgccttctgtttcacatttgatcgtttttccgcttccgcccatgcctgtcccagtcggatctccgccttggctgacaaagcccggaatcacgcggtggaaaataacgccgtcataaaagcccgtattcgccagattttcaaagttagcgactgtattaggcgcttcattcggataaagttcaaattcgattctgctgccgttttccatttcgatgtaaccagttttcattctcattcctacttccgtattgttttttgtcaaagccttctttaatatgaatttcaattgtaagccggctttctttttgatattcttttgaaggaagaggcctctgctcttcttttcgcggctattataccacaccttcagccggaaaacgaatctccccgcttccgcagaaagaaaatgaaaccagaacagcttcacagccgtctatgtatcggaactgcttctcgcaggtcctcacaaaccgcttcaaaacggcatttgtgaaaagaaggaggttaaccgctttgaaaaaaatgtggattggattgctggcggcggccgttgtattgtgcacaataccgaaaatcagcctggccgatgccgcagtcggagatgtcatcgtcacactgggggcggatctgtcaaacgaaaaccgtcagaaagtgcttgacgaattaaatgtccctgataacgcgacaaaagtgacggtcacaaataaagaagaacatgaatatctgggaaaatatatatcgaatgcccaaatcggcacaagagccatctcttcgtcatccattacggtggcaaagaaagggtccgggcttgacgttaagacccataatatcgattccattacggatgaaatgtacttaaacgccctgatgacagcaggagtgaaagatgcgaaagtatacgtgacggcgccgtttgaggtatcaggcaccgcagcattaacgggaatcatcaaggcatatgaagtctcatcagacaaagcgatttcagaagatgtaaaacaggtcgccaaccaagagcttgtcaccacttcaaatctcggggataaaatcggggataaaaacgcctccgcgcttatcgcaaacattaaagatgatttcgcgaaaaacggtgtgcccgatacaaaagaaggaatcgagaaaaaggtcgatgatgcggcttcaaaccttaacattacactgactgacgctcaaaaagaccagctcgtttcattgtttaataaaatgaaaaatgcaaagattgattggggccaagtcggcagccagctcgataaggcaaaagacaaaatcacgaagttcattcaatccgatgaaggcaaaagctttgttcaaaaagttattgatttcttcgcttcgatttggaatgcgatcgtgtctgtatttacaggagacagcggatcaagttctgacagctgaacgcaaaaagagaccggacgccattgttccggtctcttttttatttattgtttgaccccagtcttaaacggcagatccagttttacaatgtcttcataagtttctcttctaatgacaagatgcgcttcgccgtcttccacaaaaacgacggcgggacgcggaatacggttgtagttgttagccatgctgtatccgtacgctcccgtgcagaaaacggcgagaagatcgccttctttcacttccggaaggtctatatcccaaatgagcatatccccgctttcacagcacttacccgcgatggataccgttttgtcgtggtgttctccgattctgtttgccgatacggcttcatatttcgcctgataaagcgcaggacggatattatcgctcatgcccccgtcaaccgctgcatatttacgggtgccgggcacttctttttgcgaaccgatggtataaagcgtcgttccggcatctccgacgagcgagcgtcccggttcaatccagatctccggaatgtcaaaagcgtgcagcgctgcgttttcttttaccgcttcgataattttttccacataaacggcgggatgaaggggttcatcctcttccgtgtagcggatgccgaagccgccccctaaattcagcacttcagagacaaagccgaatgattctctccattcattcagttttgcaaagattttttctgcggccagcacaaagcccgccgtatcaaaaatttgcgatccgatgtggcagtgaacgccgagaaggcggatatggtctgactgcaatacttgttcaatcgccttttctatttgcccgttatgcagatcaaaaccgaatttggaatcttcctgccccgttgtaatataatcatgcgtatgggcctctacccccggagtgatccggagaagcacatccattgtgcgccctgatttgcggcacagttccgcgagtaaggatatttcataaaaattatcaacgacgatgcagccgatttgatgatcgagcgccattttcaactcttctttgcttttgttgttgccgtgaaaatgaatcctgtcagccggaaaaccagccgcaaccgccgtaaacagctctccgccggatacaacgtccaatgagagcccctcctgctcagcgagctgtatcatcgcaacggaagaaaacgccttgctcgcgtacgcgacctgcgcctttaaatccgcgtcaatgaatgcctgtttaaagcttttagcgcgctcacgtattaaagccacatcgtaaacataaagaggcgtgccgtaatgctccgctaaatacagcgcgtccacacctccgatttccaaatgacctagtttgttttgtctgcttgtgccatgtaagaacaatgctcattccctctttctgatccgcctatgggtgaaaaggacagcttcttttgagctgtccttatacaagtcccgtataagttaagacatacaatatcataatcttctgtcggtttcaatgcgattatgaaccgcttggctgtctttgacggtctttcgggtgaacaatgctcggtctgactttcgctcccggcactgtcgtccggacgagcacctgccacagcgccttgccgttaaacggtaaaaacggccataaatacggcgtatgaaacgaacggatattcgccattatgatcagcagcaatgtaaagcctatcacaaagcctttcacttggaaaatggccacgagcaccattaagatgaggcgtatcattttattggcgaggctgagctcataactcggcgtggtaaatgatccgatggcggcgatcgatacatacagaatcacttctgctgaaaacagccccaccgctatggcgatttgaccgatcagcaccgccgcaatcagacccatggcggtggataaagcggtcggcgtatggatcgcggccatcctgagaaactcaatccccaaatcggctaaaaagatttgcagaatgatcgggatgtgcgtatttttatttaaaccgataaaatccaatctttcaggcagaagagacggttcgagaacaaagagaaaccagatcggaagcagaaccgttgaagcgataataccgaagaacctgatccatcttaaaaatgttcccactgaaggcgcctgcctgtattcttccgcatgctgaacatggtgaaaaatcgttgtcggcgttatgatcacgctcggtgacgtatcaacgacgatgatgacgtgcccttccaaaatgtgattggcggccacatccggccgctccgtgtatctgaccatcggaaacgggttgtagccctgtttgacgatgaattcttccactgttttatcagacatcgtcaatccgtcaatgtcaatcgcattcacttcgttttcgacgatgctgacaaggtccgggtccgcgatgtcttctatatacacaatggcaagatcggtcttagagcgctcgccgactttcgtaattttgacgcggagcctttcgtctctgattcgtcttctgatcaatgctgtattaatgacgatattttcgataaaaccgtctcttgccccgcggacgaccttttccgtatccggttcttccggtgtgcgtccggggtaacttctgacgtcaacgataaaggcgaagcccgcgtcttcaacgataacggccacaagtccggaaagcacttgatctgttgcttcgtcgagcgttttgactttttggacctgctgattgacaagcctgttttcaacaacgtcaatcgcttcatccgcattctcatcataattattgacgtcgacgagctgttccattaaatgaatgataaacaaagtatcggttaatccgttgacaaagtaaatctggacttcccggtctaatactcgaactttgcggacgccgacatcatagctcgttcccataccgacgcggtctttaaaaaattgttcattttttctaggatcccggtataccttgatcatgttttccggtttttccggcatgactttcgctcctttctaaaatgaattcgaccgccttcatcgtaatcggcgagcctttggatatgtcatcttttctccccatctttcctatgtcgccgatgcccacaatgagaggaacgtccaatttatccagacaatacaccgtatctccgttcattctgtgctcgtccatttctctcattccggttttatcgacgccatactccgtcacttctccatcacggtcaatggagacatcgactttcgtccattcagcctgatgggtcttagaagcgaccgcaatcacccccagcacttcaatgtcctgatgtgaggcgacatatttcagcgccgtttcgcccggcccttccccttgcaggcctgaatcgtcaaacatgacaaacaccgggtcattcggcgcggctttaatcagctgaacaagttcggggccgcttctggttgacggattgccctttgattgggaaatacaccgcccgcctgctttttccgcggcatattcaattgttttggcggcgtatacgtccccgtctgtcacaagaatgaccttccgtttcgtcatcaggcattatcctttcggtttaaaaataatggctacaagaaatgcgaataaaatcgctgaagatataccggcggaagtaagttcaaaaatccccatggcgatcccgataaatccatgctcgtgagcttgatgcatggcgccgtgcaataagctgtgaccgaagctgacaatgggaaccgtcgcgcccgcacctgcaaattcgataaatttgtcatatattccgaacccatccaacaaggcgccgatgacgacaaaagttgtcatcacatgggcgggtgtcagtttaaaaatgtcaagcagcagctgaccgataatgcatatgattcccccgcaaacaaaagccaacagatattccatttatgatgcacctcccgcccgctcaaataccacaccgtgcgcgatggtcggaatggtttctttctgctggatcattgtcggacttaaaagcgctcctgtcgcgacaacgagcaccctgttcagagcccctgattttaattgattaaaaatatgtgtgtacgtaacaagcgcggagcaggcgcagccgcttccgcccgcaaacacctgctggtccggcgtatagatgagaagaccgcagtcatcgtgtttcgttccggcgggatagccttcttctttgagcaaatctttcacgatcggcgagccgacgcctgaaaggtctcccgttaaaatcagatcataatcatccgccgtgcggtttaagtcctgcaggtgctgtttgattgtgtcggcggcagcgggcgccatggcggatcccatatcgaacgggtccgtaatcccgaggtcgcttacttttcccactgttgcgcttgtaatcttgatatcagaagggttttggctgatgatgaccgccccgccccccgtgaccgttgaagtggcggtatccggtttttgcccgccatactccgtcggattgcggaattgccgttctgccgtcgcgttatggctgctcgtggctgcgatcgcccggttcgcaaaaccgccgtcaatgagcgcggatgcgacggcaatcgtttccattgatgtcgaacaggcgccgaacagacagaggaacggaattttcagatgtctggcgacgtagttggcggtcacattttgatttaaaagatccccgcgagtaacaaatcaatatcgctctttttcaaattctgtttttgcaaagctgagttgatggcatcttccattaactgacgttccgccatttcccagtttttctgattgcaatgcatttcatcgtatgtcttatcaaacagcgaaccgagcgggccgtctttttctttcggtccggctgccgtccccgccgcatttacaaataacgggttttcaaacacccaggtttgctttccggttaatttcattttttctcctcctacgaaaacagtttttcacaagcaaaccgtatcaggcctacgatataggctgccacgacgccgaatacaatgacgtttcccgccaatttaaacatgtttgtcgctactccgagcacgagtccttcacttctgtgttccagagccgcgcttgtcatactgtttgcaaaacccgtcaccggcacggctgaacccgctccggcaaactgcccgagtctgtcataaatgccgaatccggtcaaaagggcggaaattaaaataagagtggcggccgtcgggttgcccgctgttttttcattaaaattaaaaaagtggatgtaaaagtcttgaagagcctgtccgatcagacagatcaaaccgccgatcagaaaggctttgacgcaattccaaacatatggcggtttcggctgatagtctttcacttttgttttgtaattttcttttaagtttgtcacgtcggttcctccttatgaatgatggataaaatacagccaatgaaataaagagccggctattttgccgaacacaatggccatcagcaatataatgattttgctgccgaagccgatccgtttggcaagaatgggaagcacattcagcacttctgtaagcgcggcggccagcatgccgataaacatgccggccaaaagcccgaccggaacggccagccattcagataaaaaaaaatgattcatatttaaggtttcccagccgccgaacacagctcctgaaataactgctccttcgtaggcctgtacaaagcgcattgtttttgtcagctgcataaggcgggggacgattcccataacggttaaaaaagccacaaagcccgcgcccacggtcagccctccgccaagcccgacaaatacaacgaaaagaatgctaacgatcatgcagatctttcatcgtctcttcattttcgtgcattgcgacataatgatcgagatcaagctgataattaaacatctcgacttccagcgggcttggctcttcattcaggcgttttttgaagatgtgattaaaaaagacgatcataccgagaccgaggccgatgctgtatggaatctgaagcagatacgggtattcattccgttcgcccgttatgatttcatataaggcgatatgaacttctctcatactgacatcttcatgaaaattcataatggcaagacatgaaccgataaaaagcaggagccagacaccgacgaataaaacggctgacagctgctttttctggtaatggatttccactatcgtttcagcgccgccgacggcctgtacatcaagcgcgggaaaagcggtatgaatggttttcagcacttttatgatgtccagcacgacgatatttttgtcttttttcgtgaccttatacagcggcagtgccgacagtttttttttcagcttttgctgtcccgcaatctgcgcggcgtcgccgactgtgatgatatctccggtatgagccttcacgcggtggcgaagtctgagaaatattcgtctttccatcttgcatcaccatctttcgggtggttatatatgtagtatgtggttcacttttgttctcattcatcagccgcaaaagaccataaattaccaccgatgcacaaataaaaaaagccggcccgtaaaaggtcagctttccgtatgatccatctgcactttaatctgctttaatatttttttctccagcctcgatacctggacttgggaaatcccgagccgttcggctacttccgactgtgtctgatctttataatatctcagatagacaatgagtttttcccgttcttccaaatcactgatcgcttccttgagggcgattttgtcaaaccacttctcttctgaatgatcggcgatctgatcaagcagggtgatcgggtctccgtcattttcatacacggtctcatgaatggatgaaggcgcccgcaccgcttcctgcgcaagcaccacatcctccgcatcaatttctaaatgatccgcgatttcctggacggtcggcactcttccgtatgtttttgacagttcatctttcgcccggcgtattttattgccgagctcttttaaagatcttgatactttgacggttccgtcatcacggatgaagcgctggatttctccgataatcatcggcacggcataagttgaaaaacggacatcataggacaaatcgaatttatcaacggattttaataatccgatacagccgatctgaaacagatcgtccggctcatagcctctgtttaaaaacctttgaacgacggaccacacaagacgcatgtttttttctatgaggaggtctcttgcctgctggtcgccctcttggctctttttgattaattctttgacttcatggtccttgagctgcgcgtttttgctgtttttcttaacctccacatccataacaaatctccttaattacaaagcgctttgctttttgataggtgttttgttaagcgtatcgtcgttcccatctccggcgaggaatcaatcgtgacatcatccataaagttttccataatggtaaagcccattccggagcgctcaagctcgggttttgtcgtaaagagcggctggcgcgcttcctcaagatccgtgatcccgaggccttcatcacgtatggtcagatagacgacatgatcctccagcgtaacggagatgtacacctttccgtcgcagttttcttcatagccgtggatgattgcgtttgttaccgcttctgatacgacggtcttgatttccgtcagctcatccatcgtcgggtcaagctgcgcgataaaagaagcaaccgttacgcgcgcaaacgattcgttctgactgagggctgaaaattcaagatgcatctcgtttttcatgaagccacccccaacgttaaaagcgctttttgttccgattgttcgaacctgatgattttaaacaggccggacatgtcaaacagacgtctcaccgctggcgaaatcgcgcacacgaccatttctccgccgagctgtttaatttgtttataacgccctaaaatcacgccgaggccggagctgtccatgaaggtaagatcttcaaggttcagcacaatgtgacggatgctgtcagcctccagcgattcagtaaccttttgttttaatgattctgccgtatgatggtcgagttcacctgttaatcgaatacaaagcacggattctttgacatgaaagtcaattccaaggctcatgctcattcctccttgtatgatcggataatgagtgtttcgattttcgggaaagcaattccttcactatgacaaaactagtgcccgttcgccatgattatttaaattttgtccaatctcccatcgtccgcttcagaaaagtgagaaaacccgctttttccatgtcgtcttttgccgtgaccgggctttcaacgagcacctttccgtcttttttcagaacgaggctgccgagcacctctccttttttaaccggagccgttacattgccgttgattttcacttctttttttactttgtccatgttctctccctttttggccagaagagaaatcggctcagatgtggtcagcttgatcagtttctgttttccttttttcacttttaccgttccgacgatttgattccgtttgtacagcgggtgtgttttgaactggctgaaggcgtaatcaagcattttggtcacttgggcgtttctttctttcggggtgctggctccgaaaacgacagcaatgaccctcatattcccttttttagcggtggcggttaaacaatacttcgcttcgcctgtaaagcccgtcttcacgccgtctacacccgggtaaaatttgatcagccggtttgtattgacgagccagaactttttgtctgtattttctcttaaataatcctcatacgttcccgtaaattgagtgattttatcgtactttaataattccttcgccattttcgccatgtcataagcagagctgtaatggtctttttcaggcagtcctgtcgggtttttgaaggaggtatctttcaatcccaattcttttgcttttttgttcatccggctgacgaaatcctcttctgaaccggcgatatactccgccattgcgacagatgcgtcatttccggaagctatcgcaattcctttgagcatttcttttaccgtcatttcttctccgggttcaaggaaaatctgtgatccgcccatggacgcggcgtgttcactcgtcctgactttatcgctcatctttattttccctttgtcaagcgcttccatgattaaaagcatggtcatgatttttgtcatgcttgccggcgccagacgctcccggctgttcttgttataaagaatgcttcccgtatcgcgttcaatcagcacggcgcttttggcttcatgagcgagctccgatgtatgttttccgtccggctttgcaaaagcggacggtgctgatgccgttaataaaatgccaatcaacaaagtggatataagacgtttcatctccaaagccctccatttcataatcctttttattttttccaaatccggtggttttatacgcctcatctggaaaatgtttcgtgttgagggcacaaaaaaacagctgcttccgaagaaacagctgacttatgctgacttatttttgagatcgtgcgactacggctttgacaagcttcaaaaagccgccttttactttttccgtcatttccattacttcttcatgagataacggctggtcaagaatacccgccgccgcgttggaaatgcatgagatgccgagcacgcgtatccccgcgtggttggcgacgatgacttccggcacggtcgacatgccgacagcgtcagaccccatcgttcttaaaaaccgaacctcagcaggtgtttcgtaagacggccccgtaacagctgtatacacacctttttgaacaggaatgcccagctcatcggccgttttttcagccaagcttgacagctctttgtcataggcttctgacatgtccgggaatctcgctccgaattcagcttcgttcggcccgattaacgggttggtgcctgtaaagttgatatggtctgtaataatcatcagatcgccggcgcggaattcagtgttgataccgccggctgcattcgtcacgacgagagattcaacgccgagcgctttcatcacgcggactggaaatgtgacctgatccattgagtagccttcatagtaatgaaagcggccctgcatcgcgatgacctgcacgccttcaagcgttcccatcacaagctggccggcatggccttctaccgttgagaccggaaaatcagggatcgtttcatatgtaagcttgacagctccttcaatttcatcggccaatacgccgagccctgaccctaaaatcagaccgatctttggtgtttctttcacgtgttctttaataaatgcagcagcacgttcgatcttttgtttcaaaaaaagtccccctactgtaatcttgataaaaagctttttccgtattccggcttttccgttttaaaattatcggcaatagttgcgccgatatcggcaaatgtatccgcaagcggcagctgttctgtatgtttgtgctttttgctgtaaacaagaagcggcacatactcccgcgtgtgatccgtgccgtgatggacaggatcattgccgtgatccgcagtgataataagcagatcgtcttctttcattttttcaaacacttccggaagcctcgcgtcgaattcctcaagcgcttttccgtacccttccggatcgcggcggtgtccgtacagcgcgtcaaaatcaacgaggttggcaaagctcaggcccgtaaactcttcaccgagcgtttcaatcactttgtccatgccatccatattagataccgtgcggcgggaagatgtaatgccttctccgtcataaatatcagaaattttgccgatggaaatgacgtctaatccgctgtctttcattccgttcattaccgtgcggccgaacggtttgagcgcataatcatgacggttcggcgtgcgtttgaagctgcccggctctccgacgaacggtcttgcgataatccggccgaccatgtacttcggatcaagcgtcagttctctggccgtttcacagatgctgtacagctcttccagcggaacgacatcttcgtgagccgcaatctgcagcacggaatctgctgatgtgtaaacgatcagcgcacccgtttccatatgttcttttccgagctcgtccagaatcgccgtgcctgaagccggcttatttccgatgattttccgtcctgaacgccgctcaagttcctgaagaagttcatccgggaatccttccgggaacactttaaacggtttttcaatgtagaggcccataatctcccagtgccccgtcatcgtatctttcccgtttgacgcctcctgcatttttccgtagtacgcaagagggtgctccgttttttccacgcccttaatgtctccgatcagtccgagaccgagctgcgccatatggggcatatgtaagccgttcatgtgctctgcgatatgtccgagcgtatttgcgcctatatcattaaaatcggcggcgtccggcgcttcaccgattccgacagaatccattacaattaaaaatacccggttatatttgtattcagacatcataaaagcctccttttcttccatctgtccattgtagcttacagaggtcagacaactcaagtataaaccgtttacattcttgttgacaatgccgattcaaataattagaaccttctctgtattccgccaatccggcaaaaaaagccgcggcccctctggcagcggctcctaagctcgcggatgatactgtttgtacacgtccttcagccttgttttcgtcacatgcgtataaatttgtgtcgtggaaatatcggcatgtccgagcatctcctgcacggcgcgcagatccgcgccgttttcgagcaggtgcgttgcaaaagagtgccggagcgtgtgcggtgtcagctcttttttaatccccgcttcaagggcgatttttttcaggtttttccagaatccctgacggctgatctgcctgccgtgatgattcagaaaaagcgcttcggttacgtttttctttaataatttccctctggctttttcaatgtatgcttctatcgcatgggaagcggcttcaccaatcggcacaatccgctctttccgcccttttccgaagcagcggacaaatcccatcgtcaaatggacgtcggataatttcagctcgatcatctcgctgacccggatgccggttgcgtacagcagttcaagcatggctttatccctgagaccgaacgggctgtcaagcttaggcgtgtccaataaccgctcaacttcgtgaagcgccaatactttcggaagcgtccgctctgttttttgtgtttcaatatgtaccgaaggatctttatccgcggctttttcccttaacagaaattgatgaaaagaccggatcgacgccaaatgcctggcagacgtcttgccggatttcccggagtcctttatatgctttaaatattgaataatatgaagacgggtcacatcattccatgaagtgatctgaagggtttcagttaagaagagagaataacttttcagatcacgctcataggacatcatcgtatttagggacagccctctttcaaccctcacataatggatgaaatccttaatttgatccttcactcttgatctactccccgttttggtaaaaaaagatcaatcggccgaaccagccgtctttctcctcatgttccgttttggccactttgacggcggagccttccggtttatcgtaccgatgatagttttcatactctgaattcacccatatcatagcataatagaacagcgcggtaaaacctgtgaacagaataaacactttgatcgtatccgcggctgttttcaggaatctgcccatctttcgatcgaccctttctttggcggctgttagtacaccttatgccaatttcaaaggcttttatacataaaaacagcaaaaaaccctttcctggcagaaaaggttcataggcttttactctgtttcatccccgcggcagcggtggcagattccgtgaaaagtcaatctatgatctttaattttaaatttccaatcacgttcaatcacttcttcaacgtcttcaagcagatcttcttcaatttcatcgacggctccgcactccatgcacaccaaatggtgatgaaaatgagccgcgccctctttgcgaaggtcgtagcgggatacgccgtccccgaagttaattttatcaacgacttttaattctgttaataattctaatgtacggtatactgtagcgagaccaatttcaggagatttctcttttacgaggaggtatacatcttctgcgcttaaatggtcttcttcgttttcaagcagcactcttaccgttgcttcccgctgtggcgtaagcttgtagcttgacgagtgcagctgctttttaattcgatcaatacggttttccatgtctttccctcctacgccgcattccatgactcattataacaaaatacgcgcagagttccaactataattattataaactgataaataaaagtattattttgtgataataattctaaaatatgcgtgatgacagcttttccataaacagcggagacatgtacgcttcgagcagtgaagcgaggaccgagaagaaaacgatgagaatcagtacgaaggcgtagcgtccgaaccattggatcggcgcgtcatgaaggctgcgtttgacaaacagctgccggatcagtttcagtgaaaaagcgatggagcatgtccccatgataagatatgctggaatgagaacgatgttttgcggcagaaccgaaataaatgacaggaaaaacccgttcatccccatttgattcactaaaaaaccgaccgtgaagccgacgacgattccttttaagaacaccataatgaaaataaccggaagaccgatcacggaaataccgagaatccacatcagccccaaatattttacatcatgaaagacggcctgccaaaacatttctgaagcgccggcatgttttccgtcagacagctgtccgaaaaacttgcttaaatagtaatacaaatcttctttctgcgtgatggtcatgctgttgacgatgatcgccccgaaaatgacccccatcaaaaacaagacgaacacaaatatataaagtgacagatgatcctttacatggcgaaaaaacagttctttgtacgattgttttctcataccgctttcctcccgctaatctattgacttgatttagtagattgtatgaaagaaaagagaaaacatgacagagaaatcatagaaaggcgcgagattcgggcataaaaaaagaacccccgtcatcactccggtgatcataggggttcctttttttatgctttattctttcaagcctgtcttttttagttttcgtcactctttcatgggtgctgaaaggcggcgccgtcccccttgacaagactgcgtcacgcatcccgtttcttctgagatgctcccgcatttttttcgttttgctcttcgccatgtgccaatcgctcctttttgccttttctttatcataacaaaaaaatcccgatgtgttcatgaatacggctcatgtttcgaccggtaagcgcgcagagacgttttggcagatgaatagctccccatagcggcgtatccgtaaaaaaatcccatgaaaatccccgcatacacgtgttcatggtgaccgaaaacgatagacacaacatttccggcagcaagggcaatcgtgggaacgaatatgcccggaacccggcagaacactttgatcagctgtgtaacgcataagacgaccggcacgccgatcacagcatcccaaatatttgtatggatcagcggaaaataatccacattgacacctctttattccgtcttttgctatctgttagcctgcctaagaattccgtttcctattcatctaaaaaaacagcaccggcacatgtccggtactgtaagagttgtttattttcctgccgcggcccgttctacggctgctgatacagcctgatgcacgtccgcatccaaaggctgaggcacgagatcgccgtgttttgtgcaagaggcgatggcttctgcggccgccacaagcatttcatggtcgattttcttgcttttggcgttcagcgcgccgcggaaaatccccgggaagccgagaacattattgaccgagcggccgtcggctgcataagcggctccggcttgtaatgcgtcttccggttcaatctccggcttcggattagataaggccagaatgacatgtccttttctgacatcctcttttttaatgagacccggaactccggtggtgctgatcacaatgtcacacgtgtccattaaatctttgatgcttccaagcggctgacctccgtactgagcgaggcggttcattgcgtcttctgacttgtccgttccgcagaccgctttgactccgtatgccataaacatccggcagatggcgacgcctgccgcgccgagaccgatctgtccgaccttcgcttcttttaaatcaagaccggcgcttttacaagcggaaatggcggcggcgagcgtgacgaccgccgtgccgtgctgatcatcgtgcataaccggaatatccagttcttctttcaggcggtcttcaatgtcaaagcagtgaggcgaaccgatatcttcaagcagtattccgctgaaccccggagaaatatgttttaccgtgcgaataatttcttccggatcagaggtatcaagcaaaatcggaattccgctgatacccgccagctggtcaaaaagcgcggctttcccttccattacaggcattccggcgacagaaccgatattgccgaggccgagaatcgccgtgccgtcggtgacaatggcgacagaattgctgattgtcgtatagatggacgctttttcaggctcgttttcaatcagtcggcacacatcggcgacgcccggtgtataaacacggccaagctcagccaatgtccggatcggcattttgcttttcatttgaattttgccgccttcatgagcagagagcacttcatctgagactgtatgaagccggatgccttcaccgagagcttcaatggcttgaatgatttcctgcagctgctcctcattttcggcctgcaccgtgatgttgcgcattgtgtagttcgggccgactttaacggtttcaacttccccgatatctccgcccatcactccgatggcggttgccacttttccgagatttccgggaacagtcggcgtttcaatcattaacgtccgaatcatatgctttgtaatcatgaaatgaacctcctaacccaatttttgagattgcaaggatttttctttcgtgtaccaaatgaatttccccgtgtatccgtacaatattgccagtccgatagatacaaaactgagccacatgaacggcagatatgaaaatgtggatacgccgagaatgccggccatatagatgccgttatcagaccacggcaccatccctgaagtaagcgttccgcccacctctgcgttccgggataaaactcttctgtcaagtttcagtttatcataactgttctccatgattttcggcgtcaggatcaatgacacgtacatcgcacagccgaaaatgtttcctaaaagggcgacgatcaatgtcgaaagcgtcacatttcccggtgtggtcagctttttctcaaaagttgagacaatcacttttaatacgccgagcttctcaagaattcctccaaaaccgagaccgaacaggataacgactaacgtatccagcataccggtaatgcctccgcggtttaacaggccgtttaaaaattcgacgtccgttttaatagaaaaaccattataagcagtcgcgatggcactggcaaaattcattccctgaaagacggaagcccagattgcgccaagcaaagcaccgatgataataacgggcatagacggctttttcaaaatcagaaggacaacgacgacaacagccggaatgagcatccatatatgaatatcaaacgttttctgcaatgaagattttaaaaattccactttgtcgagatcaatattttttccgccgtatataaatcccgttacggtaaatagaatggccgtaataatataggacggaattgacagatacatcatcgctctgacgtgcgacagcacatccaccttagaaagcgtggaggcaagcaccgtactgtcagacagcggtgaaagcttgtctccgaagtaagcgccggacaaaacggctcccgctacgatcggaagcggtatacccattccctctccgatggcaatcatggcgatccccgcggttcccacggttccccacgatgttccggtcgcaacggacataacggaacaaataaccagtgtagccagaaggaaaatatgaggattaataaactctaaaccataataaattaacgtcggcacaacaccgccggcaatccatgtcccgatgagcgcaccgaccgaaacgagaatcaacaccgcttcaagaccgtttgatatcccggtgacaatcgaatcctgcaagtctttatatgaatatcccagcctgactccgagaataatagcgaaaaaccaggatattaatagagctagctggatcggcaggtctaaaaacactgtgaacgataagacaagtgctaaaaacccgaataataagataataatttccaataaatttggcaatctgacctctttcacaagaaaatccccctagaagaaaaaagctaaaacgctttcatcaaatgatataacaaattatactatactgcctcatccctttgtatggcaaccgcctattcactgaaaaacgtgaaaaggcggctgttgttgctttaaaatttatttttctaatagatcttttccggcaatccccggttttgtcatttcatacggattcaaaatgatatccaattcttcttctgtcagtacatcattttgaaggcaaagatctcttacagattgccccgtcatgatggcttcacgggcaattcgcgcagccgcttcatagccgaggtgcggattgaccgctgtaatgacgccgacgcttttttccacgtattgcttcagacgtttttcgttggcttcaattcccgccagacaatgatcggtaaatgaacggaacccgttattcatgatgctgatggattgaagcaggttaaatacgagtaccggctccattacgttaagctccagctggcccgcttctgaagcgaggcagatcgtattgtcattcccgatgacctggaaggcgatttggttgatcagctctgccattacagggttgactttcccaggcataatggatgatcccggctgacgggcgggcagtgaaatttccgcaagtcccgcgcgcggacctgaagccattaagcgcagatcgttggcgattttagacatgttcatcatgcatactttcaacgcggctgaaacttccgtatacgcatcagtgttttgtgtggcgtcaaccaaatggccggcgccgacaagcggcagtccgctgatgtcagccaggtgctttacaacctgttctatgtagcgcggatcggcattaagccccgtccctacggccgttgcccccatgttgacttcatacagatgctggcgggattgtttaattcgctttatgtcacgctcgagcacgcggctgtatgcttcaaattcctgtccgagacggatcggcacagcgtcctgaaggtgtgtgcgccccattttaatgacagaatcaaattgtttcgctttatccttaaagacactcagcatatgcgccatcgtatcaaggagcttatccaaaagttttaaggtggaaatatggattgccgtcgggaacacgtcgttcgtcgattgggacatgttgacgtgtgtgttcgggctgaggtgaatgtattcaccttttttatggcccatgatttcaagggccctgttgccgattacttcgttggcattcatgttcatggacgttccggctcccccttggatcggatcgacgatgaattggtcatgccatttcccctcaagaatctcgtctgcggcctggacaatcgcatttccgattccttcatacagccgttttacatccatgttggcaagcgccgccgcttttttgacgatggcgagcgcattaatcatctcttcgtggatgcggtagccggtaatcggaaagttttctttcgcgcgcagcgtttgtattccgtaatacacatcagcttcaatttgtttttctccgaggaaatctttttcctgacgatattctttttgcgcgtttgtcatgctaaaaccctactttctctttgtggtagtcatgtttttacagtacaacgtcgtctgcgatcggtgtctccataatgtttttgacttcagccaagttgtgagactggccgagcgcccacattaatttcggcacgatggcttccgtgttcatatttctggagcggataatgagatcttgattgactcttcggccgacttcatagacgctcatgtcctctccttcttcaagacattgtgtcgtaatgacgacgacaatgccgctttcaatcatttcattgactttggcgagaatgtctcttccttcaaacggcacgccgccgctgccgtagctttcaatgacgatccctttgtacatgccctttaatgcgtcaaacatttccggtttcagccccgggtggagcttgagcaggcacacgtccgtgcaaagtgaggtattgaccgtaaaggcatcgtcttttggcatgtgcacttgtttgttgtattcaattccgttttcggtaataaacgcgatatacggatagttaatgctctcaaatgcatcatagcttttcgttcttaatttaatggcgcgtgtgccttgaatgactctgccgtcaaatacgacgtatacgccgcccaccccttcacatgcgaagcggatcgcgtccgtgatattttttttggcatcggttttttgaaatgtaatcggaatttgcgaacccgtaatgacgatcggtttatcagcatgctgaagcatataagacagtgccgctgatgtatacgccattgtgtctgtcccgtgcgtaatgacgaacccgtcatatgcgtcatatttttctttgacagcatttgcgatttcggcccagtattcaggctgcatatttgtgctgtcgatgttcattaacgaatgggtttccatcgtgtaatcgttatcaagttttgatacgtaggttaacaattcgtctgctttcaccccgggtgcaagcccgttttctccttcgactgaggcgattgttcctccggttgttaacagcaataattttttcataccctgcacctcttcatccatttctcaagatgtgttaagcattcgcttttcgcatacttttaatcaaattatagacagacgattgaaattaatcaagtgattattattcaattcgcgtacacttttgcatatcgatatgatataatttgctcaagtgaaaaggagcggttttgaatatgaatttagatcgtttaactgaactgagaaaaaagaaaaattggtctcttcaatatacggctgaccgtctcggcatcgccaaaagcacgtacgccgggtatgaatcaggataccggcgtccgtcattcgaagcgctgggcacgcttgccgatctgtttgacacgacgtgcgacgatttactggggcgcactgaaaaaaaggcggagccgtttacccagaccatcgaattaacaaacgccgcacaaggccgcggcacactgaccgttgacggacagccgctgaatcaggatgaaatcatcgaattgattgcgtttgtccgcacgaaaaagaaggtgcaggaggagctccgctaaaatccggcttttacgacttgattctgccgtacgtccctccgcccccggcctcaaggacgagctgcccggtgcgcgctttatgaatgacagccgctattttaggctggacgacatgcgccaattcctcttcttgcgcctgatgaagaatcgccatctccgtcccgaaagcccgcttcagtttgtctaacgttttcggcccgacccccggaatgaactgcagcgggatttgatgaatatacggcggccgcggcacgcggctttttttcgggccgctcagttcctccagccgttcactgaccccttttgtcatagttttccccccgcactccggacaggcggaagctcctttttcaaccgggctgccgcagcggtcgcaagccgtccggtaatacttcccgagcttcgggttcagcccgtaattcgccgtgatttttcttccgtccttcccttttaaagccagcgaaaattccgtgaaattcgcttctttaagaagcatttcattatattctctgccgatttttcctaaggaatgcgcatcagaatttgttaaaaatgtatacggatcaagttccgttacccgcgaagccatgtcggtgtcgcagcttaatccgagttccgccgcatcaatgagcgccgggtcgaaaacttctgtcaaagaagatatgaccccttttccgtacaggcttttatgcggggtgaacatatgggcgggaataaacagcccgcccaattcctttgttttcctttgaagattcaaaccggtttcataaatacgctgggaactgagatggatatttttaagcctttttgcgagccactcagaaaacatcttcatttcggcaagagacggcataaagacgagaacgtgaatcggcccgcggcatgtgtgatcatagatttcaagctcactgcccaacagaagcgtcgtattccgataccggatgccgccttctttcagctcacggtatctgccttcatcaattccgcgctcgatttcttctatgacttccggggaatggcagtcgatgatgcccaatagttcaattcccttcccctcactggcctcttctaaaatccgatgcagcgtcaacgttttggccccggtgattttgaccggttttcccgtataggtgcggccgatatgaatatgcagatccgcatagatggttttcatcatttttccttcagtgcttctttcagctgcagatactgaatcgcgtacgccgtttttgcgtcatacaccctgcgggattcaatcagcttcacggcctcttcaagcgtgacctgcatgacttcgacaaattcatcctcatccagttcgcgcttttcttccagcggcgaaagcccttccgcaagaaagagatgcacgatttcatcagcaaacccgggtgatgtataaaaagcggtgattttcgtcaaggtttccgccgtatatcccgtttcttcctcgagctctcttaacgccgtatgttccggctcttcccccttttcaagcttcccggccggaatttcaacgattgtccgttccagcggctttctgaactggtttaccaaaatgatttttccttcttcggtcaccgcaagtacggccaccgctcccggatgtttgacgatttcccgcttgcttgtttttccgttcgggagctctacatcctctaagtaaagatctatgactttcccgtcatacagcttttttttcgcaagtgttttttcttctaaatgtttcatcatgtcatctcccgttctgtctctctattatgcctcatatattttatcatacatgcatgagagggaggtgcttttcgattgaaggtgtaccggaaggataaaagtatcgtattggtcggaaaggcgtgggaagtgcgggctaaactgaaagaatacggacggacattccgctatgtcggagattggatcaccgggccttaacagttgaaaacttcgcgcctttatattacggtcaataaaagactataaaaaggagcgaaacgatgagaaaacgcacactgggacattctgatttagaaataagcgaaatcgggctcggctgtatgtcgctgggcacggataaagctgaagcgctgtctattttggatgaagcgatcgagcttggaatcaattatttagataccgctgatctttatgatttcggcagaaatgaggaaattgtcggggaggccgtcaaaaaccgcaggcacgacatcattttagccacgaaagccggaaaccgctggaatgatgataaagacggctggcattgggacgcctccaaaggatacataaaagaagcggtcaaaaacagtctgcgccggctgaaaacggactatatcgacctttatcagctgcatggcggcacgatggaagatcatattgacgaaacgatcgaagcgtttgaggacttaaaacaggaaggcgtcatccggtattacggcatttcctcgattcgtccgaatgtcattaaagaatatgtgaaaaaatcaaatatctcaagcgttatgatgcaatacagcctgctggaccggcgtcctgaggagtggcttccccttttagaggagaacggaatcagcgtagtcgccagagggcctgtcgctaaagggcttcttacggaaaaaccgcttgatcaagcagccgcaagcgtaaaagagaacgggtatttaacatattcttttgcagaattggaagaaaccaaaaaagcgatcggcgctgccgcacctgacttgagcatgacggagctttcccttcaatacttactgtcacagccggccgtcgcttctgtcatcaccggagccagctcacttgagcagctgagagaaaactgttcggctgcagaggcccggcgtttaagcagccaggaaatcaaagccctgcaataccatacaaaacgggacgtatacgaagcccatcgttcttaaacaataaaaccggcaccttgtcagatgccggtttatttatatttgtgccaatcgagactgctttcattcagcagctcttcaaagcttttatgtttttctttttcttttcgctttctgatttgttccgctttttgctgcgcctgttttttctcgtcttcttccttcagctcacttttcatttgcaaaagcctggccttcagatcttcctccagatcgtcttttaagctgtgtttttctttaggcagctgctttttcatcattacgccccccgtatctgaatatggtgaagcaagtgtaccacggagcgccggaggccggcaacgttcacggtcctgaaaagccggaggaaggatttttcatatgaaaggagggcccctgtgtgaaaaaatggctggcggtgttcggttcggcttgcgcagtctttttggctgccggattcgcttttacgaatctcattatgtttatgaagaaaaagacggatgaagatatcatgaaaaaagaaacggcggacgggcatgatagatttgattcctttcaggccatggaaaaagaagaggccgtcatcctgtcacgccacgggtatgagatcaaaggcttttacgtcgccccgcatcatacggcaaacgccatgattatttgtcacggcgttaccgtaaattcgttcaattcattgaaatacatggatttatttttagattcaggctggaatgtgctcgtatatgaccaccgcgggcacggaaaaagcggcggcagaacgacgagctacggctattttgaaaaagatgatttggaagaagccgtgaattgggtgagacacaaaacgggagacggcggtcaaatcggcatccacggggaatcgatgggagcggtgacggccttattatacgcgggcgggcatcaggatgaaaaaggcgctgatttttatattgcggactgtccgttcgcaagctttcgcgatcagctcgcctacagactgaagcgggagttccggctgcctccgtggccgcttctgcctttggctgatttctttttgcggatgagagaaggataccgtatccgtgatgtatcgcctctatcggttatcagccgaccggcagcccgtgctgtttattcacagtaaggaagatgattatatacctcccgcttcttccgaattgctgcaccgcagaaaacgcggaccgaagatgctctatctggccgaatcgggcgggcatgccatgtcgtacaccaaaaatccggagagctaccgcaaagccgttcaaacctttttagataccatgacgcaaacgtaaaaaagcgaaagaacgtatgctggttctttcgctttcccgtcataaaacgtcggtaatcccgtccatattttctccgatccagtcaatggcgaggtcgattgtcgtaaactcctgcgctttgaaggtcatctcatcctgaagcagccagacatccttctgaacggattcagcgcctccgatggaccagtgcagcagactgtacgggtggttgttgttcagaaaggatacccacgttttatgctgtgccgtctgtttaatggctttcagcttttgattcactttccgtttctccctgctttactaatatgctcattctcgggctcagcatctctgccgggctttttaagacgagcgtttttgccttttcattgtaatcgattgtcatttcctcgtcaaaaaacactttttgtgaggtctggatgtaaagcggaagtccgttggtttcaatggcttcgcattgtcccgttaattcgtccgccagccagatggtcggcacgccgctcaccgcgcacccgcagccttctgcgtcatagcggagctgcgcttttttccccgggttggcgtccatcgcctgctgaagtgtgtgtttcgccgcatccgtcacatgtatttgcatagatgatcctccgtttttcattttcgccattgtagcataccgagccgctgtatgcattgtttctgctttctttacagaagcccgctctcccagtcctttgcctcttgttcagccgccttgatccagtcatttttcccttcactatactttgccgtatcgtacgggtatgccttagcgagccgccgtttcagttccatgtattgagccgctttttcaggcttttcagtgaggtaatcccggaacagcagatggcgcttcacatccggatggcctgtttcgtatatgtggacgtggtgtgtgcgcttgctgccgcctttttgaaagaaacgccggccctctatcccgttttccccttgcgcctcatagccgagtgcttccagctgcgggctgaatcggtcagcatctgaaatatctttgacctccgccagtatatcgataacgggttttgcggccattcccgggatggaggtgctgccgatatggctgacagaatgaagtgcggggccgaagattcggatcaagtccgccttctctctttcaaacatctctttccattccggcttgtacggaacaacttccgctttcctcttcggataaagatgaaaaaacgagagggtcagcccttccggcgtctctgtctgtccggcttctgtgaagccggtttttaaatagagagagactgccggaacgttttgactggcggtagccgcctctattttttgggcgtcccggttttggtcgatcacaaattgaataagcgcccgtccgattcctttccgaaagccggacgggtgcaccgtcagcctgcatatgacaaggtcatatccttttttttcatacgaaatgacgcctgcaagccgatctttttctctgaaaccggcaaacgtctcccgtgaccgctgtatgtcaccgggtgtttcatgcagggctggaatgccgaaaaagccgatcagctcggcttctttttgataagagcagcgttgaaccgccgcaatttcccgcgccgtctgttcttgtgtatgccgtaaaaatgtaatcaatcttccgccccttttgacgcaaacatccgctgtgactccgtcttcgtaatgcggaccgcgtacgcttcataccaggcgctttttcctttttgttttgccgcccggtggtcagtatggtctttccaccttttaatcgcctccaggctgtcccagtaggaaaccgtgatgccgcagccgttttcctcccgaacgctttccgcgcctaaaaagcccggctgtccgcctgccaaattcatcatgcgctctgccgtatgctcatattcctcatcatattttccctttattgatgaaaaaatgaccgcataatagggcggtttgggcgtgtcagctaaaaaacccatattcatccccctctacatatatttcacaaacagaattctgtcttctcccggaccgtcataattcgcaaaaacagggattccgtttacggttttggttcctttttcaacttcaaagcctaattttgtatgataagcgattgatactttattcacgggcgccgtcacgcaattgacttttgtgcagcccctttttttcaccgtctccataaatcgatcgtagagctgttttccaatttgcatttttctgaaatccggatgcacaccggaaaaatgaatgtaggctgtctcagggtctgattgtgactgaaaaccgattaaaaaaccggtcattccctccggcccgtacgtgataaagctcgtgtcctgaaaatgttcaaaaaacaagcgcggcagtttgtctttcatctgcctgccgccccaccattcattcaaaacagacgtaaccatttcatagtcttcagaggtaattgttcgaatatccattatcgattgactctccttttcgtccggcaaaatgaatgtcagctcttctcattggaatataaaaaattatatgtgggttgtttgcaattgtaaatgatttcttttcaagcaaacgaatcagcacgtcttccagccggggaatgatttaccagtataaacgtgatcattgttcgggtacaatgaaaaacagaacaaacgttcccggaggtttttttatggctgatattcttcttgttgatatgcaatcgttttatgcgtctgtggaaaaagcggaagcgcctcatctcaaaagccggcccgtgattgtctcgggagatcccgaaagacgcagcggcgtcgtgcttgcggcttgtccgctcgccaaacgatacggcgtaaaaaatgccgaacggctgtgggaagcgcaggccaaatgtcccgacgccgttattgtccgtccgcggatgcagcagtatattgatgtatccgtcatgattaccgaactgtttgaacggtataccgatcttgtagaaccctactccatcgatgagcagtttctcgacgtgaccggaagcaggcggctgttcggtgatccttttacaattgccgaaagcattcagcaagcgattatgcgtgaattcggaatttatgcccgtgtcggcatcgggccgaataaggcgctcgcgaaaatggcttgcgaccattttgccaaaaaaaacgcatccggcatccacagattggatatgtcaaatatcagggaggatctgtggccgctgccggtcggaaaattattcggcatcggaaaacggatggagcatcatttaagacggatgggcatcagcacaatcggcgggcttgccgggcaccccgccgaactgctgaaaaaacgctggggcattaacggcgaattgcttcagcggacagcccgcggcatcgatccctctccggtcaccgtcaacacgcacagccggcaaaaagcgatcggccataacatgaccctcccgagagactacagccgctttgaggatatcaaagtcgtgctgttggagttaagcgaagaagtggcccgccgcgcccgtttcaaacaatacatcggccatacggtttcggtcagcatcagaggcgctgattttgaattcccttcaggttttcacagacagagaaagctggtctctccgactaatttcggaatggatatttttaaagcggcggtcaagctcttcaaagagcattggaacggtgagcccgtccgcagcgccggcgtctccctttcccagctggagccctgtgattatgttcagctgagcctgtttgatgctcaggaaaaaaagatcagtctcggcaaagtattggatgatattcatgagcggtacggccctgcgtcgctcctccatgccgcttcgctgacagaggccggccaagcctttcaccgggctgaaaaaatcggcgggcattacaaataattgaggtgatatacatgaatccgaacaaattaacacccgggtataatgtcatgtgggaatcaagccggatgatgctgcccgaacatcgggagcagctgcttgcaaaaaaacgaaaagaacgggaattccggcctccggaactgagcgcagagcaactgaacgacatgaaccgcatcattgcggcgtcgattgaagaagacagagccatctcggtcacctatgcttcagcacgcggcccccgccgcttttggggatgggtgaaacaagtgaggcatgacgaaaaacgtttaaaaatcataaacgatgaagatgcgttaacgctgccgtttcatcttattctctcggctgaactggaataaaagcctaaatcgtcctgacagaaaatatgatagaagagtgggaggatcacatgatatttagtagaataaagatgaatgacaagaataggagaatatatgatggatcaatttatagaaaaaatgctgggacaagccctccgccagtatggacggaatgtgtcgacagatccgctgagcccctatgaaaaacagagtttaaaaaaagctttagaagaaagaaggaatgaagaacccgatgaggatctccatgcccatgtagaagatattatctacgattacgtcaccaatcaggggcagttttcctgacacggacgtttatgcaccgggcgaaaagggaaacgtccgagagtaaaccctaaagattgcgtggtgcaggatatgcctgtcgggccttatttcaagatcggctatgccgttcttctgttatttctcatcatttatctcggaacattaatagactttttgttccagcctgttgtgattacggttaaaaccttgtttccgcccattgtattatcgggtgtcctttactatttgtgccgcccgctcgtcagagtgctgcatgcgaaattaaagctgccccaaggaatcgcgattttagcgatttatgcgggaacagccggcctttttgtcctcttcctttatacggcgggccctgccgttcaaaaacagtttacagccttcacagaccatattccggagctttccgcaaaagctgaaaattggatcgggcatcttcaggacagcaaatggttttccaggcttcagcatggggattcctttaaaaaattagcggacaaagccgcaaattattccggttcaatcgctgattctctcagcagtctggccggtacggctgccaatgccgccatcaccgcagccattattccgtttgcgctgtattacatgttaaaagaaggaaataaagccccccggcgactgctgcggcttcttccggaaaaacatcaaaaagaaggaaaacaaatcctgcgggatatggatgaagctctcagttcatacatacaaggacagctgctcgtcagtttctgtgtcggcgttctcgtcacaatcggctattttatcatcgggctcgattatccgctcgttctgggcgcgttcgccatggtgacaaatctgattccgtttatcgggccttggatcggcacatttcccggagtcattgtcggattgttcgattcaccgaccgaggcggtgctggtgattacggtcgtcgtcattgtccagcagcttgaaagccagctgatttccccgcaaattatgggacggaagctggacattcacccgctgaccattatttttcttctgcttgccgccggcaaattctcaggaattgccgggatgctgctggccattccgggatatgcggccgcaaaagtgatcataagccatatgcagaaactattcattctcagaaagaaacaaagctaggagagaaatgattcatcccccatgtcttcacatcggttaaaatgaaaaaacggcgggctgaagaagcccgccgcacacggaggtaaaaaagatgaacatcggtgatgtcatttttcaattgatctcatttattgcagccgcatttttcctgtttgccgtgatatacgtattcagaagcttgaagcagcgccgcatacaattggacagaatcgaaaagaaactcgacgcgctgcgcgaagaaaaaaacgagaagttatagttcattcagaagcaggcgcagccagctccacctttatccgatccgggtcctccgtgtatacggcgtaatgcgtgcttccgcctgcatatggatggcggtccctgtaaagcacggggcatcctctggcaagcagcttttccgtcatcccgtcaacctgctctcttgacgcagcatgaaaagccagatggttcagcccgacccggcatctgtggtactccggtgttaaaaaacgctcctctgtctgtacaagcacaacataaaatccggcgtttttccagctgatgccggagtcccaattttgaaactccctataaccgagctcacctaaaaaccatccccaaaaccgggcggaggctttcaagtcagatacatacaattcaatatgatgcatcataatattcgcttcctcctcacatcacacccgccttaccagcacctcttcaactttatggccgtcacctttcctcaaaatcaaatccgatctgaattttgtcggcaggatattttcatacagattcggacggttgacgctctcccagatggaggcggccatggtatccgcttctgcatcagacaaatccttaaatttatgaaaataagaagccggatcttgaaaagcggtttctcttaagaggcggaaacgctccaaataccacgtgaaaatccggctttcttcggcatccacatagatcgaaaaatcaaagaaatccgatacaaaaatccgcggatcttccctgtcgtcctctaaggtcggcgactgcaggacattgattccttcgataataacgatatccgcaccttcgacaacctcgacggcaccctcttccctgtcataggtaaggtgggagtatacgggcgcctccactctctctttccctgactttatatcgttcagaaactcaagcagcgctttcacgtcgtaactttccggaaatccctttctggacagaaggtttttcttttttaattccgccgtcggatacaagaaaccgtcggttgtcaccaggctcaccttcggcctgtccggcagacgggaaagaagcttttgcaaaattctcgccgtcgtgcttttgccgacggcgacgctgcccgcgattccgatgataaacgggattttcgctgaatgcggatgtttcagaaacacgttgacatgctgattccgtcttgcggcagacgtgacatgaagatggagcagtcgcacaagcggaatataaatcgtttctacttcttccaccgacaggtagtcattcagcccctctacggccttggcttcttcctccgaaacggcaatggaaagatggccgccgaatccggcccacgactcgcggctgtgctgcgtatacaatgtatgtaagttcaattctttacttttcacaattcacaccaatctctctgtatggctttccgattaaaaaacaaacgcttacaaagattgtaacggaaaaccgcctcactgtctgcccatttttttcacaaatgaggaaccgatccggctgtactcttccatttcctccttgggaaccatgcttccgccggtaccccacacaaggtgcacggcattttccatctcaagcccccgctcttttatataacggttaccggcttcggtctgaacgaacttgacggctccggccataccggcgagtgcagagggttcaaggctcttattctcggccgctcttaattgataaagcagtgaaaaaagcgtgccgtcatcagcggtataacagccgctgagtacaggctccatcagagggccggccagtccggacggccttcctaccgcaagtccgtcggcggctgtttgattatcaaggccgatatcctgcacgctgattccgtcatgcaagccggaaaacagtcctaacagcatacagggtgaatgcgtcggctcaccgaaaaaaatatggacatgcccgccatagatcagctttagcgcaagcgcgacgccgcccgggcctcctccgaccccgcacggcaaataaacgaaaagcggttcatctgcacccggctttatgttcatttgatcgagctgctttttcacacggcttcccgcaacggcataccccagaaacagatcccgggaatgctcatcatcaataaaataacaataagggtcctgcttcgcctgcatgcgcccctctttgacagccagactgtagtctgcttcatattcgatgacgcgaacccccttttcccggagcagctcctttttccactgctttgcgtcactggacatatgaacggtcacacaaaagccgagcttcgcgccgattatgccgatactcagacctaaattgcccgtagaaccgacggctatagagtattttgagaaaaaagcggtaaaccgttcctcagtcaatatgctgtaatcatcgtctgttgagagcattcccgcttttaaagcgagatcttcagcatgcttcagcacttcataaatcccgccgcgcgctttaatagaaccggaaatcggaagttcattgtcgcatttcaaaagcagacgcccggggaaagcctgagcggcgctttgttccagacgctttttcatttcattgatgaagacaagcggagactcaatgaggcctcccgccgcttccgtctccggaaaagccgacgcgatataaggcgcaaaccggcgcagcctttcttccgcttcggcaatctcctttctccattcagcgccattctttactggatcatcggttttatgcgggttgatccaaaatacttcacgcgcctctgccatttgcctgactaaaggctctgtcatcaatgccttgtgtatatccaggtcggacattcctttctcccccttgttactttttctttaatgcgcggccggccagtttttctgtaaacgaagggaaaagctgatacagcttcgtcccgaggctcatccatcgcggaagattcatttcccgtttatccgtcagaattacggatgtaatacgctctgccacatggtcggcatcaagcatccatctgccgacgcttttcacataaccgccctctttatctgcaattgtaaagaagtctgttttgatcggaccgggattaaccgttgtcacggctacacccgtaccggccagctcaagccgcagcgcattggaataccctaaaacggcgtgtttcgtagcggaataaaggcttgatttcggcgtcgccaatttgccggcctgtgaggcgatattgataatatggccgcttttcgcatgaagcatcaccggaagacaggccttcgtacaggcgattaatccgaagacgttcacttcaaacattgccttcatatcctccaaagatgaatcagcggctgtttcaaaaataccgaagccggcgttgttgattaatacgtcaacatgaccgatcaaacgccttacgttttcagcctcttctgcatgccggacgtcaaacggaatgacatcacactgtccgccgcgcgcggtaatcgtttttttcacttcctgcaagcggtcctcccgcctggcggataaaaaaacatgagccccttctgccgcgcaggaatatgcaagccgttctccgagtccgccggatgctccggtgatccaaatccgcttatccgttaatctgcccatttccttcaccccttcacagctttaaacatcagagtatttcccgactgaaaggattcagcctccccttttgcagccagtacgtcaagatggccgatcgtttctgacatcattaaaaacaattcattttcatacacagccggaaacagccgccggcatacctggaaagccgtcagcgtttcctctgacaacaggcgcagcacatattccgaccggtttctctgtttttcaagccgcctgtcaaaagcaggctttacgtccgtcagcagatcgccgtgtcccggatataaaagggacgggtttacgtcatacagccgcttcattgagttcaagtagtcgagcatcggggccgcgcgcacgccccccttttccggagcttccagaatcggattggtggagctgttggacaaaagcagatcgccgctgaacatttcaccgcttttttcatggtagagcgcaatgtgagaagcggcatgacccgggatttcgagcaccgtccagccgttaagcccgtcgattttcccgccttcttccactgttttcgttaacagacggtttgcagaaaataagtacgacagcttaactgttttctgtatgtcttcaggcgtcaggggaacgcccatttcagtcataagcgacagaaaaaagtcctcctgccgggcgatatacgactgatcctgagtaatgtacctgtcattcagcggatgcccgatcacttccgtatcctcggaaaaaaggtgcagcagacctgaatgatctgcgtgatgatgagtgagcaccacctgttctatatccgccgcagaaacgccgtgttccttaagctgaaatgagagcgattcagccgcttcctttgtattcgggccgcagtcaataagggttaaggcttcatcttttattaaataaacgataacgtcgccgactgcaaacggagtcggcacacgtatcggaatgatctttctcgctgccatgtttacgctccttcgttcttttcattcctgaataatcatattttagcgttttcttttcactgtgtcattattgcgcatatcggaaaaaaagattgacatcccgctctttcgcatagcataatgaacaacaaactagaaaacacggaacgcgatgacgaggaactagtatataaacaacggcagcagagagcaatgtccccggctgaaagacattgcggccctcttgtttacagaacctgccctcagagcggttaggaaaacctaaacgtatccctcgttacgggatttgagctgagcacggctgattcgtgctaatgtaaggtggtaccgcgaaaccttttcgtcctttttgacgggaaggtttttttgtgttttagaagaaggaggatttatatgaagaaaatcggttttatcggggccggatcaatggcggaagcaatggtgaacggactgctgcaaagcggaatgacagcccccggacatatatatatgacaaaccggtcaaatgacagccggcttgaagagctccaaaaaacgtacggagtgaaaccgtgccgggataaagaagagtttttcagcaataccgacattattgttctcgcctttaaaccgaaagatgcggcagaaagcattgagaacattcgcgaatacgtgaaagatcagcttgtgatttctgtcatcgcggggctgacgattcacacgattcagcaatatttcggcagaaagctcaccatcatccgggcgatgccgaatacatccgcggccattcagcaatcggcgaccggtttttccgcaagctccgaggcgagtgaagctgaaatccggacggcaaaagagcttctggaaacaatcggagaagcgacgctctttgaagaaaaacaccttgatgccgtcacagccattgccggaagcggtcccgcctatgtgtaccggtatgtggaagcgatggaaaaggccgcccttcaagccggcctgccggaagaaacggcaaaagagctgattttacaaaccatggccggggcgacggaaatgctcagaacaagcagcaaacggcctgaacgcctgcgtaaggaaatcacaagcccgggcggcacgactgaagcaggccttcgcgcattagacgagcgccgctttgaagaagccatcatgcactgcatcgcagaaaccgcagcccggagcgccgaaattaaagaacaattcgcaggctccgttctgcaaaagacggaccagtcataaagcatgggggcatcccatgcttttttcattctgtttaactgccgtataagcggctgattctctcttttacttcaggaagatggaatgtggcttcgtgcatgtttacctcttcctcaaccgcttttgtcagctctcttttgatccgtgcggtcacattggttttcagcgcaaccagtgaggctctcggtttatccgccagcagccgggccaattcgcggcctctttgaagggcgtcttttttcggcagcacttcaaacggaacaccccgtttttccagagcggcgccgctgaaattcgcggccgtaaacagcatttcttccccgaggacaattcccagtttttcaggcacaatatacgtcgcgcccattcccggtgtaaatccgtacttcatataattacaagaataaaaactctctctgcttaaaatgacgaaatccgagctcagaccgatcgtaaagccagctccgatggcatgcccctgcatgacggaaatcacagggatcctgcaatccaataaaagactgtgaagctttaaatctgtaaattgaagctttccgctctgaatggtcaaaagcccctcctgcgttcctcccgtgcagaaataatttccgtaacccgtcagaaggacagttttataggacggatgggcattgatgtcttggaatacccggtgcagctctcttacaaactcttctgacagcccgtttttcccggccgtatcctgcattgtgacctgcacaatgcccggttctgtttcctgtacatcaatcattggattcatgtgtattctccgtttctttaaaaatactcaagcctttccggctcttatactaggtcgtccattcatactttctgtgaaactcttttatttcagtcagcactaatcgcgtttttccttgatgcgcattcgggatgtctgctgcgggcgcggcatttcttgtgccgaattttacgatgccgctgtcttggagcagccggtcataatcagtcatcgataaacggacgcgtccatccaaatgccggctgatctgaaattgattctgccgcgcacggctttgcggcataacgacaccgctgtaaaattcagagcagcagcccgaaccgtatgaaaaacagccgacgcgtttcggcgtttcaaaagagccgttatcaatcgtgctggcaagagataaaaatacggtggcccccatgatgttgccgacgcgctgacagtattgaatcccaggcagcacgcgttgctgaaaatccgcttcaatgtcctgcggcttagcctttgccaattttctcatcatcgtccgatgcgctccttttaccattccgccaaacggagtatgaaaagaaaggtattgaaatgtattcttataatccgccccgctcacacgctttcggtattcctgaaatgaattttcacagcaatccaaataagacatgagcgacagatcagcatcccccgcttcactatccggaatcgggcggcaggtatccatgacttcatacccgtaatacccgcttgcaccttgatcaagcaaaaagacatgaggagtgctgctgactaaaagcgcgacagctcccgcccccgcactcggttcggcataggaccattcctccgtcaacgcgtcaccgccttcagccactaaaaagcgggaaatatccgttccgatgatgagcgctttcgctcccggcgatgtttgcgacaagatgaaattcacgcccatttgaaacccggccgttaaagaatagcaagcctgcttcacctcaaataaccggcaattccgcttcagctgcaaataatcatggacatatgtactgatggatttgccaaaatcaatcccggattccgtacaggtaatgaccatttcaatctgattccgttcctcttctgacagagaatcgataatcggttttgcggcatttacggcgaacgtaatcggatcttcaaacggaagcgccaccactttttctttcatcagcaggttctcaaacctttttttatccaggttccgatgttccgcaagctccatgacgtctacatacgcggttccgccaaacacgttcattgcttcgattcctacattcatttctccaagcccccagagtaaagaggcttcccgcgaagcctcttttattttttcgttcaaaactcaacaagcagcctgtcaacgccgtgaaatacagggctcggaaccagattcggctcttgatcctcagtaaaacgccatgcgggcatctgttcaaaaaagtgggaaagcgcgattttcgcttcaagccgggccagcggcgctcctaagcaataatggctgccctgaccgaatgacaggtgctgattcggctttcgtcccaagtcaatctgatcggcattttcaaacttcttttcatctctgttcgccgatccaatccacgcatatactttttctccggccggaatcgtttttccgccaatctcgctctcaaccgcggtgtagcgggttacccgctgaatggaaggtctgaggcggatgacttcctcaataaagtcaggaaggagcgccttattttcaagcagccggggcagaatatgcgggaactccttgagactgagaaatgaatttccgatcacattttccgtcgttacgtgccccgcgacgatcaacaagccgcaaaaaccgattaattgcttgtctgacagcggctctccgtctaaatcagctgaaattaaatggctgattaaatcattttgcggctgttttctccgctgtaaaataaactgcataaagtatccgatcatctgcttttgcacttcattcattttcttttcatcttttacattctggctttggtcgacccagcttttaaagatatccctgtctttcggaggaaatcctaaaagctctgcgatcacgataatcggaagcggaaatgcgtaatcttcaataatgtccatcctgccttttgaacggacggcctgaagcaggtcatcagcgatagcggctatacgcggtgcaagagactcaaccgatttcggcatgaacggctgattgaccaattttctgaagacggtgtgttcaggcgggtccattttcaaaaggctgtctttgttaatatgccggatcattttttcctgcttgtccgcacttaagtatttatgatcggaagaaaaatgactgtagtcagaaatcacccgcttcacttcatcataggtgaagatttcccagcaatcttccttttcattgtaatgaacgggagaggtttctctcatcgtttggtaccacttgtacggctgctgctgtctgatttttgttaaactggtcattttcattcctccaagatgtgtccaagatttgaaatgacccgccaaagcttacgagtaaacccggcgggcggatatgtgaatttacggtcttattttggcgggctgcttcagcatctcaccatgcacgttcagtatcttttcctgcagtttcagaaagctgtgttctgtcattccgtctgccgaatataaaacgccgcaaaattcagaaatcgtttcggctgcgctgtcttcagccaataacgtcatatggttggataccgccacatccatgatggcgatgtttgtcatatgctcttgccactggctccagtagttgacgaaatcagcggataaaatatcggccctgatcgtaaaatacggatcaagctcacccaagaaaataccgtttttatttcggaaataatagcatgtcaccccgttcggatccggaagcggcaggagttcgtaatcagtgatttcgtaagcgtcctgaacgtttatattctgcctgatcagatttttcaccaacgcgtccgtcttcgttaacccccgctgtttggcttttgctattaattgctctaaaaatatgtcttcatgaagatcggcatctagttcatcacggtgaatcaaggtttcagaaatgcgttccggatgttgatagatcggtgcaaataaagccatgttcaccgtctgcagcatcatatttttatcaaataattcatcaggaatgtttatttcccgcgcacccgccgagtcaaaggagtcgagcatgacgattgactcaacggtttctccagccagctgcaattgccgggtgacttcataagcgagcatgccccctaatgaatagccgcctacatcgtaaggaccccggggctgcacggtacgtatgagcttaacgtaatattccgccatgtttttaatgccgcggatcggttcccggtctgtcatccatcctcttgcctgaattccgtaaaaaggacgcccggtccgttcggcaacaggctggtacagctccactgcccccagcgcggaatgaaaccagaaaatcggtcttccctttccccccgggttaagacagatcagttcgggcggttcttgatcatctgtctcttctgatatatcgttttgtttcgtatgttcctcatgtacttcatcagtgtctttttgaacggaaccggtcagatacccggctaattttgcgattgtcggatattcatagaccagatttgccgtaatagacgcttgatacgttttattaatagactgaacccattccacaccgataatagaatccagccccatgtcaatgaatgcctcatgctcatcaatatcttccggcttcagaaacaggatgtccgcaaggctttctttaagctctttgcgcaaagtgccgtcagagatgccggcaaggggagtttctgcttccgggatttgcggacgtaccgctgtttcctccgcttcagcatactcgggtttctttatttgccccgctatatattccgcaagctcctcaagcgtcgggtgttcatacaccttattggcagtaatctcagtgtggtacgttttatttactgtttgtatccattcaaccccgataatggagtcaagccccatgtcgatgaaaggctcatcagcatcaatatcttccggcgacaaaaataaaatatctgccaggcttatcctcaattcttcaagcaatgttctattgtcttcggaaacggcgttttccggctgctggacaggaacagtacaatccaaaggctgtaagacgatcggtttttgcaatgtctccggttcaaacgctgtcatttcgatctcagttaaaggactcagagaaatcagaccttcatgttcaggctgtggcggagacgggggaacggtttgcgtttcagactttttcatggcttggcctggtaaagaactgtttacatcagccgcccaatacctttcttttaaaaacggataggcaggaagcggcgttttataatattgccctccgtcaaaaagccgtgtgaaaggaagatcatatcctctgcaaaaaaggtcagcgatatgtgccaggctttctctgtactgtgcgggtgaagccgccgagcagcactgttcaatgcattccattccgaatgttttcattccggcttcgtctgccggcttctggtccttcaaattggacacaaacacacccggaagctctctttttacaagccactccgataatacccgcttcagttcgtccgcactgcttacgatacaggcaaaccggtgatgcagatgctttctgccgagcaggagcgtataacttatatttcccagatcgctgtctttgttcttgctgagtgaatccagcaggcgttctgcctgaatttccagctgacgctccgtccgcgcagataaaggaatgaggcaggccggttttgccggtgaccggcgcacggtttgcggcgcctcttcaataacaagatgggcatttgttccgctgaatccgaatgaactgatcgcggctctgcgcggtgcatccggattccgttcccacggtatcagcttttcattcacaaaaaacgggctgtccgcaaattgaatatgctgattggcttgatgaaaatgcagggaagccggaatctgccgatgcttcagcgacagcaggattttaaacaatccggccatccccgcggccgcagcggcatgtccgagattggttttcacagagccgatggcgcaatatccttttttatccgtatagcggcggaaagcgcgcgttaaggcgctgaattcgatcgggtcgcccagtgcagtgcccgttccgtgagcttccaccatttgaatggtttccggattaatgtgaaaagtatcatagacatgccgttccaatcgttcttgagaaagcgcgcttggagcggttattccgtttgtagcgccgtcctgattcattgcagagccttttatgacgccgtacacatgatctccgtcactgacggcgtcgctaagacgtttcagcaccaccgctcccacgccttcacccggcacgaagccgtccgcgctttgatcaaacgtatggcagcgcccggtcggtgacagcatattcgccttatttgacgactgataaaaagcgggagtggattgaatgaaaaccccgcccgccaccgccatttcggtttctttcgtccagagcccctgacatgccaaatgaatggctgtcagcgaactggaacatgctgtatcaacagtgatcgccggcccttgtaaattaaggtgataggcgatccttgccggagtgacggaattgtgattgccccaaaaagcctgcgcgggcccctgctgtttaaaaatggcctggtaatctccgccgcaggagccggcatacacgccgcattcccggcctcttaccgagtctcccgcatatcccgcatcttcaagcgctttccatgattcttccagaaacagcctctgctgcgggtccatataggttgcttcacgtcccgatatatgaaagaaaacgggatcaaaacattcaatgccctctataaaactgccatactggcattgactgtcagagacagcccatctgtctgcttttttaatcagatcccgtccggcggctaagttttcccaaaactcatggacattctccgattcagcaaaccgcccgctcatcccgataatcgcgatcggttctttttcaggtaacacagctgctgattttaccgtttcggccggatccttttgttcggggcggtacgtcatttgatacggctcagaaacgctgatgacgattttcccgatatttccgcggtcatccagacagtgatacgcttcttttatgtcttcaaaggaaaagatttttgagatgacaggctgaatgactccctcttccgccagccgctgcagttccaattgatagtccttgacctgatccggattttgaagagacagcttccgcaaatccacgctgtgaaacgattgattgttatgaaggacggacaagtcgactgatttagcggatttcagcgcagtcatggcaatttcgatatatcttccgcccggcgccaggcaattcattcctttttgcatggcatcaccggccagggtattaatgacaacatccaccccacggccgccggtcattcgcatgatttccgtttcaaaatcttcttccaaatagcaaatggtattgttgatcccgagcgaatgcagatactcaatttttttctgtgatccggccgttgcatatatttccgcgccgatatgccgggccatttgcaccgcgatcagccccgttcctcccgtcgcggtctgaattaatattttttcgccttttttaagtccggctttccggaaggcgtctatcattgtcactgccacggtaggaagagcgcatgcttcttcaaaggtcagccgggccggtttatgatagacttgatgttctttacatgtgatgagattcgcctgagagccaaattcctctcccataccgacaatcacttcatcacccggaatgacggatgttacatgcctccctgtcttgatcacgacgccgcttgcttcgaatcccggagtgaacggataaggcggcatcgtcggatacagccctctgacacaaagcaagtctccgaagttcaaagaaaaggcgcggacggctatttgaacttcgtcatcttttgtctcgggcacttcactgcgggcaatcgtcagatcttcaatgccgcccggacggtcaatcacaacccggaacattcccgagtcatcggactttgcgaaagaaagcggcatccgttcttgtttcggtttctgataaccgttttcctttctatccgtcttcaaaggtttttcagcaggccgttcttcctgaagcaccgggcggattttcgctctttcggtctccagagatgaggctatgatggtttcatattctgccgagatataaccggtcagcagtttcacatgatagtaatcaaataaaatcgttgtctgcagtgtaagattcaatcgcttattaatctcgttaatcacattgacggccaaaatggaatcaataccgtattcagagaaattcagttcttcctgaatatcctcttctttcatttttaatacatcggcaatacttgttttgatgacagagcggacatgggaagcgaccgattccccatcagccttaacagcttgatgctcctctggcgcgcggctgcgggaaacaggctgtgcgggctttcggaaaacttcggccggggcggcgtatggctttctgccgtctctgatcccttgcatccggacgagtccgtcactctcagctgcgataatctgctgacctaaatcatgagccgtttcagcagggaaacaaaccgctctgtatccttccgaatgcagcacacgctcccacgattttggatataggccgggacttcccggaatccgaagctcagcatcctcataggaccaccagccgtcaagcagcccgaaggttaaatgggtaaaaacagaacgatcgctgatttcgtttatcaaaatcatcccgttgtatttcaggagcgctttcagacggcgcagtgtcaaaccgatattttttgtggcgtgaagcacattggcggcgatgacaatatcgtaaacacccgttttgatattttgtgattcgcaaggctcctccgcattaaacaaggctgttgtcaaatacggcacatcaggtccgtattcctgttcggcatgcattaaaaaagctttagaaacatccgtataacaatattccgcaatctgttttgcaaatggtttcagttttgtaaacagcatggcgctcgttccgcccgtcccggcccctacttctatcagcctgatacgggcatcgggatgttctgtaaggtaggctttcaggtaagcggccgcggaatctgctaacacttcattaaaataatccgcaacgggattatgcttataaacaccttcaacgagccgcattgatgaatcgggaaatacgatatccgtagccggacgttctccttttaaaattgaaggcatcgcttttatcgtcgcctcggccaattcagcttgcgcaagctcccccttgggaagcaggcgtttatgggcattccactcattccagactgtgcggccgtccgggcgctgatccgcgagaagagtgatcgtgtatccgtcatacgcgatatatccgttttcttttaatagattcaggctttcttccagccatctgccgtatgtgccgatcacgccggcgctccgcatggatgctgcaggtgtggtgacaggctcgctgaaaaacccgattgactgtaattgataaaagagcagtttgcaaagaaggctgttcatatgcgcaactccatttctcgttttaaagtctcaagccgttcattccgatccggattttgccgcttgacgctttccataaatgaaggctccgggccggatacaaccgatattgcatcttgatccgtcagtgcggctaagccgtgcggagcagctttgatgaatgccgcttggctgaacggttctgatagtaagacttccagcgcctccattgcttcatcgggttcaatagaaccgatccctgacgcctccatccgttttctgtaagacgggtctgatacaacgcccagactgccccaatatccccaattcatgactttcacttcacaatcaagcaaggaagcgatatggcgggcaaaggcgtcttgaaatgtacaccctgccgcatagttgctttgcccggcattttttgtgaaagaattaacggatgagaaaaacagcacaaaatcaagcggttctcccttaaaagcttcgatcattcggacgctcgtattcaccttagctgaaaaagcgtttctgaaagaagcttcatccatattcgccatacttttgtcggcaagcgttatcgcggaatggatgactcccgttatattgccgtatcgctctcttatggaacggacggccgctttaagcgctgcggcatcttgagcatcagcctgtatataatgcggcgcggggcctgatagggccagcctgtctattttgctctgaatctcctgatccttcggccgcctgccgatccatatcatccgtgctttgtaacgggtgatcatgtatttgctccatgcttctccgatgccgcccgctccgccgatgacagcataaacgccgccttctctgtacgacatacgcggagcggaacttgtcagcacccggactgttttttgcttgtgccaagctccgttacggtacgcggcagcatttccgtccggatctggaggaaggcgccagatgtttttcatctcagacgaatcactgccttcttctgcatcaatcagcctgatgtcccagttcggatattcttttgccaatgaaccgatcaaaccgtgtacgcctgcatgctcaggctgcgggagatcacccggatacacggactgtgtctgccgggtgaccgccgtaaagctgatgtttcggtttccatacccgagtgacagcagcgctttgatgaaacggaaacattgaatcaccccattctcctgctcatcaagcatttcctgactggcggatgcgggtgcgaaacgatccggcgcaatccataagaaatggcggatatcttgataaccggctgtcaattcacgtaatgtttgctcgcttgaatgatccggcgtctccgccagatgggcgcggggccacatttttgccgcggcctttatggtatttcccggctttccgatgatcagcaattgttcctgatcaaccgctcgattttcttccagggaaaagaaagttttgtcccaaacaggggcaagcatcgccgtctgaacttcctgccgtttgctttcggtttggtttgtctgccggacagcccggcaggagaagcccgtcaatctcatacaaacagcgccgttttcatcacataaatcaatatccagcgtcagcgctccgttatctgaccgatcgctctgtttgcggacaagcgcccacatcgttttctgagtcggctgaaatatttctgcctgccgcagggaaaacggcagcatcggagtgtctccggcagtatctgaaccggcccccagtgacgcctgaaacgcggcatccagaagactcggatggatgacaaactgatcggcggtactgtctgccgtttccggcagcgacagccgggctgcagcccccctctctccgatcatcagctgatcaatgccttgatggctcggcccgtagatcatacccgcatgccggaaagcctgataaacctcatcagacgtcataaccgattgactgcagccggacagccagccctctaaatgaacagacggaaccgctgctatctctcccgataccgcagtgcctttactgtataaaatccgttctcccccaggttcttccgataggctgtaaatcgtaaattcaatgtcttcattttccttaagaataaggctgatatggacttctacatccgtccctttatgaatgacaggcctcatccatatgagatctttcaaatacattcctttacgtccgtccggcacagcgtatgcggcacgctcaacggccgctctggccatttcgatcacggcggctcccgggagcaccttctgtccattaactgtgtgatcagtgaaaaagaattcccgtccggtaaaaacagaggtgaatttcagctcccaaagatcggatgtgttttcatggagcagcggatggatcaccgttttgccgtcatccctttttgaaaccgcctcggcttcatcttgaatccagcatctgacttttgcaaacggatagacgggaagactgattctccggggtttttgttccgaatataacaagttccagtccacatcgactccctgcacccacattttcagcaaatgaccgtactttctctttttcagccatttaaccatcgcttcctgcaaatcttcatcagattcaaacacagccactgtctcatgatttcgcttcgcccgtcccctgtaaagatgcggtgcgttttcattttccaagtacgatctgagcttgtcctccagctccttaagggagtccgcaatgagagccagccgctcatccatcgcttcgcgccccgcttgtaaagtgtacgcgacatcaaataagtccggcttatcaatatgcttcttttgaagaaaagcaagaaggcgctccgcatattctgtcagacgctcgccatttttcgcagacagcagaatgaccgccggctcttggctgctgattgcttgtttgacaggagcctcatattcttcaataatgatatgcgcgttagaaccgcccgcaccaaagctgctgattcccgccctgagcggctgttcttctccgtctgctgaaatccgtttccaatctgttaattcacggcagacggaaaacggcccttcatcaaattgaatattcggatttaaaacatcagcatgcaaggatggggcgatttgtttgtgcttcatctgcagcagcacttttgtaactgcggcgatgcctgctgccgattccccatgtccgatatttgatttgacagacccgacaagacatgtttcaggaacatcaccgaatgcatcggttaaagcccggatttcaatcggatcgcctaatttcgtccctgtcccgtgcgcttccacatagctgatccggcccggagatacccccgcttcctgtaaagcttgagaaatgacttcgctttgcgccttggggttcgggacggtgtaaccgctcgctctcccgccgtgattaatggcagctcctttaatgacgccgtaaatccgatctccgtcttgtacggcgtcttctaaacgtttaagaagcagcaccccgaccccttctgccggaatatagccgtcacctccggcgccgaaactcccgcagtgtcctttagatgagatgaactgcccctggctcagcatgaagtacttgttaggatgaacggtgagattcactccgccggcaagcgccgcgcgaatccgatgatcccgcagatcccggcacgccatgtacaatgaagtcagcgaacccgaacacatcgtatcgaccgaaatgctcggcccttgaaagtcacaaaaataggagacacggttagcaatggatgaaatcccgccggggagcccgatatgccgtcctttcactcccgcttcagccgcgaatagcgggtattcctgatacatgacaccggcatacacgcctacctgacgccccagttcaggtgatgtcctcgtatatcccgcatcctccatggccatccaagcatgcattaaaaacagccgctcctggggatcaaggtgttccgcttcccggggggaaatcttaaaaaactcaggatcaaaatcggcgatcccgtcaatgaacccgccccatttgctgtagatcgctcccggcgccgtacggtcctcggaaaagtaatgttcccatttccagcgatctttcggaatttcggtaatacaatccttgccttgtttgagattatcccaaaacgcatcgatatcatcggcctgcggatacttgccggaaatcccgacaatggcaatatccagcggttttcctttcgtttcctgacggctttgattcccggacggggcaaaagacgcattttcaagccgatttggctgaagcacttctttcacagacgcatttttcaattccgccagctgttccccggtatgactgaggattgcggcatcaaatgagagaaacccgtcttttttatgtttgattgtattcaccacatagacggtatcagacatgacaggtccgtaaagcgtcagcctctcaatcatgagcgggacgtgaatccgctttttcagctgcaattcttcttcaccgagcgacatataacatgaattcaatataagcgggtcaaatgcaaagtgatgcagatcgcctttttctttttttcctgataagtccagctgcaataaaaaggagctctcactcattttgtatcccgctgttaccgttttcagcatcgggcctatcgtgaagtcggcaaccgaatcgtacagacgggaaatgacatccggcgccaccttttgtgcatgcgacttcatttgctcaacgtcatatgatttttttatgggtgcctctgtatatctgcttatttctccttccgcacatgtcttccggctttctttaccggagacagtgcagcttgctgtaaagcgttcggcactcttttctgccgcaaatgaaatgtcaatctgcgcggcctctccaggctccagcgtgacgggcccgcccgtaaagcggatatctttcagctcggcgggacacgtgccggaatgagacgctccggatgcttcaagcaccagacacggatacactacacccatcagtgccggtttgccgaaaaccagatgatcctgaaggaatgcttcatgttcatagaaagtaaatgtctgactgcctgattgtgtttcagagaccggtgctgcatctgcgacaaggctggaagattcatctgttccttttgtttttatgtcttcgagcagttcggatatgctgctgcactcaaataaaagagtcggattcagacgcagatcaaacgccccttcgatgtctttaataatagccagaagctgtgacgattcaagacctaattcaaaaaacacggtgtgcgcatcatttcttgtgactgaacggcctacgtatgtcgagaaaatgcggtataaggtttcctccatctgctgaacgcctggtatcagctgccggtcaaaccgcacctttttggctgtcaggccgagcagtgaagcaatatgcgcaccgctgaggttgtaaaagtcaatatccattttcaccatttcagaaggcgtgccggactttttcgaaatcaccgcgtaacagcgctccgtaacagtctcagcggcaataaacgactcataataaatcggtaaaaataactcggcgcctgcagctgtctgcaatacgccggaggccatggcggcaccgtccatcagcgcgggatgaaagagagcgccggggagattttcccggcatgaatcagactgccgaatatcaaggaaacatgcctcttcataagcatagatctctccctccggcttcatcagcccgtcatgcgacagtccgcggcttctcgcggcttcgtaaaccgcatgcaaggagactgatggaagtgcggcttgttgttttttctcccctgcgtcaagacgcctgtctgatgagaagacttcttcatgcatctccgctgataagaaaaccgtcccggaatccgcctcgcaaatcgaggcagtccagaactccttttctttactgaatatgacactcacatcaagccgctctgaccgcttcactgataaaggatgataaatggtcacccgtttcagacagatggaacggaatgaaagatcaaggctttgctttgccagctgatacagcatatcaatataggccagaccgggcatgacagattctccgtgaacaagatggtttttcataatgggatgctctgccgtcaggcgcagattcactgtttttttcatggttagtccccttttaaaaacgtcacgttgtcacctgccaaaacgagtctgcaggtgcagtgcttgtctctgcttttttctcatatttctttaaaagatccgcaatgtccgttttttcattacttgttttttccggttcactttccgtgctgttccagccgcccaagagcgggtagtgtttttttctgaattccggcggctgaggcgaccggtgatgttcccgctgtctttcacctctgtattcttcaacgaggatatgagcatttgtcccgccgtcaggaaatgaactctgagctgcgacgcggggtttcttctctgaatgccaatcaacgggttcacgattaaaatgaatacgcgacgcttcaaagtcataatgttcaaatgggtcacgcgctgataagaaaggcggaatccgcttatgatagacgctcagcacacatcggatgaagcccgcaagacctgaagacagaagcaaatgccctacattcggtttcaccgatccgatccggcagggcagaagcgttttccggttcagctgatagacatctgagagcgccttgatttccaccgaatcaacgattggggaaccgcctccgttcacttctatatatccgatgtcttcaggcgacttttccgccatattaagcgcagtttgaatgacatctctctgcgctcttatattcggtgaaccgggaccgagcgtccggccgtcattgtttaccgagacggcttttatgacgccgtaaatgcggtctccgtcccgcaccgcatcgctcaatcgcttgataaaaaccgcccccgctccttctccgagcacttctcccgctgattcacggtcgaatatatgaaacacgccgttctcatttaaaatatggcgcgctccgaataaccggtgcgcggacggagataagagcagactcaccgaaccgactaaggccgcgtcaatccttccggccaaaagggcgtcttttgcaaaggacagcccgatcagccctgaggaacatgctgtatccacgacaaggctcggccctgtgacattcaaaaatcgtgaaatgttggccgccaaatagttttgccccgcccccaaaatcgggttaggcgcctgcaggatatgttccataccggctgaaggctgcgccctgccgccgatgtacacgccgactttccggcccgacaaatccttttggccgtacccggcatcataaacggaatgaaccgcttcttctaatatgatccgcgcctgcgggtccataattgccgcgtctttttcagagatgccgaaaaagcccgcatcaaacatgtcgatatcatcaatccaccccgcataatcctttgcatttgctgttgcatgccagcgcgatgcggggacaggccggatggcagtattccctttcatcagcagctcccaaaaagcatccgttccgcccgcccccggaaaacggcaggagatgccgacgacggcaatatcgtcttcggtatccgctttcggcttcatggatgttctctcttcagcggcggcggttacatcaggctgaacgtccccgtcttgaacgaaaccattttcttttgtcacaaaatcggcttcatgatgcgctgcgaaatagtcaaccatttctgtaatcgtttgatattgaagcattaaggacggtgttaacttgatgctgatccgtttttgcaatgattgaaccaattccgcaaagagtattgagtcaatcccgtattcatcaaacggcatatcatcttttatctgctcatccgtcattttcagttcttcgctgaaaacggtgcgcacccattgacgaatcatatccttcaccttttggtcaccggcactgctttttttcatgggagcttcagttttcttcaccttcagaagatcaccaaaatcagccttactgtcttcgggaacacaaggaattccgcagctttgtccgtttaatatgatgtaatctaaaaacttcagtccgtcttcggcagacagcctggaaagtcctgatttttgataagcaggtgtttccggcaggccttcagccatgccggtttctttccagacgggccattgaacggctttaacaaacacgtttcctttgcctgcctgatgatttgcaaaagagtccataaatgaattagccatcgcgtagtcactttgccccgcagcaagcgaagggatcagacccgaaacggatgagaacaaaataaaaaacgacagcggctcattccgaacggcttcatagagaccgccaagccctgttactttcggcgtgcaaacgctttcgatctcagtttcggttttgttataaaaagcggggtgttctcccattgcacccgcgcaatgaaaaacaccggtaatcggtcccattgtgccgcggatgctgtccgtcatgttccggagccccttttgatccgtaagagaaacgctgtaataacggatctccgcgccccgctcggctaacctctgcatccgctcggctttttccgggagaatgccgtcctttttcatgtcttcccactccgaggaatcgggaagcggctcccgccccatgatgaccagttttctgcacccgcgtgaaacggcatgctccgccgcaattgcgccgatcccgcgcgatccgcccgttattaacagcacatcatcagacgaataggaaagctcaggcaccgcagacacattcgtacccggcttcagaaacggcacataacggcgattcagcctgtagcagcattcactgccgcttttggcccgcggctgtaaaaattcagtttcaatctgtctgcttaattcttctgtatgctcaatcgcacaatcgctatctatcgtaaaagaatgaatgttggcatactcagcgcccagcatccggtacagccccgccgttttcgccccctgcatcagaggtttactttccttgaaaggctggaggcggtgtgtcacttggctgagcacagcgccgctatgacggaatgattccagaacctgctgtaaaaaggcaagctttccgtattctatctcttcccgccgttcatattccgcatcatatgcggttatgtcgacgaccccgagtatctgtttgttttgaagagactcccgcactctgccgtaaaggtttcgccccgatgcggcagcgtaataatcggcgccgtcttttgcctgatggatgaaacagatcgtttcaatatggccgtttcctttaaatagagcatcggccaatcggctcgtcttatcagttgcaagtatcattactgttcctgataatgcttcagactccgccggatcttgctgcttccagtctttttgaagaatgatcttttggttttccgccggttcgtctgtctgtttccggatatccgcaggcacaggcacccaataccgctccttcgcgaacggatatacaggaaggctgacccgtttcggcttctctccttcgtataactggctccagtcaacggcggctccttttgcccactccgtgagcaatctggaatattgcttgtttttcaaaagctcggccattccacttgttgaaataacatcttgagcacgtccgcggaaacacccttcaatttccgttttccgttcaagcacatccttcagtttcgcttgcaggccgcaaacggatgtaacgatcaatgccagccgttcaggcatcgcttctctgcccgcttgaagcgtgtaggccaggtctttaagattgacttctttttcccgtaaaaagcggtcataccgtttgacatattccaatagccgttcttcattttttgccgaaagcagaaacagaaccggctcgtcttcccgtatactcagcgatttcttttcagcctgcggcggcagatattcttctatgacaaaatgggcattgctcccgctggcgccaaaagaacttaaacccgctcttctcggctggtcaggatgtgacggccgttcccattcttccagccggtccgccacataaaacggcgtatccggaaatggaatatggggattcagcgtgtccgcgtgcaatgacggaaagatttctccatgcttcagctgcaaaagcacctttgttaatccggcgattccggcggctccttctaaatggccgatatttgatttggcagagccgatggcgcaaaaccgctttttgtttgtccatttgcggaaagcgcggctcagcccttcaatttcaatcggatcacccagagacgtacccgttccgtgagcttcaatatagctcaatgtctccggatcaatgccggcactctgaaaggaatctgtaatgacttccgcctgtgatgccggatcaggcacggtcaaaccggatgtttttccgacatggtttaaagcggagccttttatgacgccatatatcggacagcccatcttttccgcttcttgaacggttgtcagcaacaccgcgccgacgccttctcccggcacatagccgtcaccgccgtcggcgaagcttttgcagacgccttctgaagacagaaatccggcattcgccaaaaacgcatatttatgcggatgtgtgaccgcattaacaccgccggcaatggcgaattcgcactccccccttttaatgctttcacatgccaaatgtatggatgtgagcgaagaagagcacatcgtatcaacagccattgacggccctgtaaagttcaggcagtgagacacgatattcggaacggaggcaggcgtcacgcccatagacagcggtgtgccccgctgtgtgatttcagcgccgaacagctcataatggctccaaaacacacctgcgaataccccgacgcgttttcttttttgtgaagatggcccgcgcgccgttctgtcctgataaaaaccggcatcttcacaagcttcccaagccgtctctaaaaacagccgcgcctgcgggtccatcatttcagcctggcgcggagtcagattgaaaaacagcggatcaaagctgtctatgcgatctaaaaatcctccgtaacagtagaactgatctgcttcatatgagaaaggataacctttccatctgtctttcggcattgttgtgatacagtctttacctgagcgcagattttggtaaaattcatcgatgcttcccgcctgcggatatcttcccgccaatccgattacggcaatatcgtgctcttctgtatgtctctcttgttttcggctccttctcttgacagctgcatgggataatgaagagcggttcttgtctgccatcggaaccaatcgggccatgctttcagttacagcaggctccttcccgtataaaataacggattgcagcttgccgagacgcagcatatattctagtgaagccatcccttccccggccggaagcgggctggtgccggttgcatcattcatgatctctttcatcaaactgtcaacctgcatgccgccatcttcccaaagcggccagttgatcgtcatagaagccccggtccgttcgcctttttccgctttgcaatcgcgatatttcatatattcatccataaaagcgttcgctgcggcataatctgtctggcccgcatttccggtcaacgccgagaatgaggaaaatgcggcgaaaaattcaagcggttcatgccgtgaagcttcgtccgcatgaatcaggccgctgattttcggcaggaacaccctcttcaagtcagtactgtctttttggatgataaattgatcttttaaaacaccggcgcaatgaaaaatgcccgtcagacggccgaaagtttctgtaatctgagcaaatgcccgctctgtttcggctttgctgccgatgtccgcttgaacgtaaagaacttccgctcccaatgctttcagtctgctgatcttctcagactgttccggcgaacgcccgatgagtgcgagcttcaccttttctttttctgcaaggtgacgggcaagcagaaatccaagaccgccgagacctcctgtaatgacatatacgccgttttgtttccaaggagactgtgtctgtccgcccggtttctcaatacgttcgaacaatctgatctgccgcatatcgtctttataccgaatgtctgtgcagcctgcatgagagcagtctgcttctgttctaatgattgcggccgtctcacttggcaatctctcattcttgtcacagaaggtgatcacctgagtgcgaagagccggattttccagatgtgccgttttcagcatagccccgagagcggaagacaatgccgctccattctcaacggcgcatacaagctgaatcaatgtatgttctttcggatggtctgtcagttcccgtttaagcatacgaaatataagctcggcatctgctccaaactgctcatctgcaacctcatgctcccttttcagttctatcacttccgcttccgggcaatgtgtgccgagttcaccggtgagacggggtcctgcatcggcagcaataataagatgacgggtgtgtttttgcccgttctgcaccgccgtttccagcggatgatctttccaggcgggttcaaaaaacagaacctcatcagcgatgtcagcgtctgatgtatgccgttcttcggccgaatctttcagcacacagcccgcttcattgataaggtaatccgcaaggcggcggacagatgaatattcaaaaagcagtgtcggataaaactgctgctgaaaagtctgctctaatatctttacaagcttcagcaaatgcgccgagtcaagccccatatcataaaagcctttccgcacatcaatatcctgtgccggacgattgatcagcctggcgatttccgactttatgtaagtcaccatgttttgttccggcgtttgctgttcagacacgtcttctgcggccacaggactttcgggctctccacggccgtttttgttctgctgaggcggcttctctttgtctatcagatgggtaatcatattcgcttgtctgaccctttttactgtcagtttctcacattcggccaatacgttcccttccctgtcgtaaatcgtgaagtcggccgaataaaaatcaggttcgctatctgatgcgccgctttcagtgcggctgttttccgcagaataagtgtaaatcgttttcggaaacggctgatatatgcaaaaacgattaatcataaaaggaatatacggtgtgtcattctgcttttgggccgacaatgcaaaggaagagccggcaagggtggacgcatctaaaaaagccggatgcgccttgaatttctcccggaatccttcagccaaatcactcagagtgagctccattaattcttctttatcctgaagctgataaacggccccttcatttttcataaactcgccatgctcaatatggcttcttcttgcaattccgtaaatgtcatgcatgtcccattttcggcttgcgtttttcatgaatgcttcaatattcagctcttttgcccggggcgtgtctttttgcaaataaagctgacattccatattctcatcccgttttccgccaagcggtgtgccgttttttgctttttcgcttgtaatctcaactttccagctgtcacgcgccggcgtaaaggtgacatacaggtgtttatcaaactcttcagatgttacaacaggctgcttaaaaataatctgtcttaattctataggcctttcaccgagatacccggcggcgagccgatacagcatatctattaaagtcacgcccgggaggacgcggatttggtgaacgcgatgatcccggacgatataattcgtatggctgattttctgcaggaacgttttgacttgatcggtggcaactgccaatctatcacacctcgcttatttcaaacattgcttctgtgcccgcctcattttcttccgcttcggacaactgtgctttttcaggccaataccgctgttttcggtatactgtctggccgcctttcggttccatggtcgcttttcgttctttcggaattccttcgttgctgacaatgatatgggcgttattcccgcccaaaccgaacgcgctgaccccggccctgagtatctctttttttccgtcccaccgcttcagctcaagcacaggataaagcggcgaatcatgaaattgaaagcgggggttcggtttatggcaatgcaaagtcggcggcagttcttcattggcaatcgccagcaaaactttgatgattcccgccgcgcccgccgcactcagcaagtggccgatattgcttttgacgctccctacaccgcaaaattgtttttcatcggaataagcagacaagacattggttaatccttttaattcaatcgggtcgccgatcaaagtaccggttccgtgcgtctctacgtatgtcatggtgtccggctcgatttccgctgattgaaccgcctgctcaatcaagtcctgctgcgcccggggattcggcgtagtcacccccattgtgctgccgtcattatttatcgcagagccgtcaataacgccgtatattttatcttcgtcttctatcgctttttcgagcggcttcagcatcagcacaccgcagccctctccgattcctgttccgtccgcatcggcatcgaaagattttgaacggccatttggcgataagattctcgccgcgctcattgtgagaaaaggtttttcatcaagcaaaatgtcaaccccgcccgcaaaggccgcctccgcttctccattttgaatagcctgcacggccaaatgaattgccgtaagcgaactggagcaggccgtatctacgaccaggttgggccctgtaaagttataaatgtgcgccatatgtgcggtaataaaattttgccccgcgccaataatcgcgtctttttgcaaatattgaaatttctgatgaaacgcacctgcccttgcaccggcaaaaacgccgatacggcggccccagagatcctctttttgataaccggcatcggccaaagcttccgcgctcacttcgagccactgcctttgcagcgggtctatcatcggtgccagcgtttctgaaatattaaaatactccgggtcaaattgatcaatatcatgaataaaaccgccccatttactgatgctttttccttcttgatattcacccggctgatagtgttccccggcgttccatctgtccggcggaacttcagtgacggcatccgttccgctgcggagattcttccaaaattcttttatatcccccgcttccggaaaatgacaggccatgccgatgatcgcaacctttccccgtttcccgggcttatctgccgtttttttgctctgtttcggcgttttctgcaaagggaccttctccgcgggaaccgctgcatctgccgaaaaagcttccggacaatgtgcggctaaataatccgcgagctgttctatggtagggtgttccagaaggacagtcggatcaattgaaacggacggcagtttttgatcgatctttgtcagcacttgcgccagaaagatagaatccattccgtattcctgaaaaggcacatcgatatccatatgcgtttcatcgatactcagctcttttgccaaaagcgacttcagccaagattgaatatcagtccggttatggacccgtttttttgtttcaggaggtttggaagctgttctcattcctttatgggcggctggcttggcgttttcaagcgctttgatgtcccaatcatttttcacttgtgccggcagcacgacagttccgggtctttctcttaaaatgtaatcaagcatcttgagaccttccgcgtcagagtgacgcagcaatcccgtttgctgatacatcccgctttttgtatccctgctcatgcccgtctcatcccatgccggccattgtatgctcatgatgccgccctcattgttttctgcaaaatagtccatataagaattagccatcgcataatcgctctgtcccgccgcaagaatcgggacggctgccgagacagatgaaaacaggacgaaaaatgccggcgcatcatcctttacactctcatacagaccgcggaggccgtctgctttcggtgcgagcacccgcgcgatactgtctttggatttgcggagaaaagcagggttttcacggtccgcaattcctgcgcaatgcagaatgcctccgacaggtccgagcgttgtggttacctcttttataagccgtccgacggcctgcttatccgtcagatcaactgctgagacgcacacttttacgccctgtgattccagctttcggataagctgtattttttccgaaacgacagggtctgtttgctcaagatcccactctgttttcggcggcagctcctttctgcctgtcagaagcagtttcttcacaccgtatgcggaaacgaaatgcttggcgcataaagcgccgagtccgcgcgttcctccggttatcatgaggacggcgtcttttggaaacacagtccggtctgtttgcacggcttctggttcaatctgatcagtctgccgaagaacatagctgaagcgcatgccgtccctgtagcaaacagcagattccgttaagtctgattcaatttcttgtttaataaaagcggctgtctgctccagcggctcttcaggatcaatatcggcgtgacaggtgagaatatggctgtattcatgccgcagcatgcgataaagccccgctttttcaataccatgcatagcggccgcattatttttgaaggattcaaggccttttgtaagataaagcattttcatgttttcttttccgcggccgtattcaatcagctgctgcagcgatgccacccagctgatgtcctgccgcttttgtcgggagccgcagccggtgaagtcaataaacccggaatagatggccgcattcgcatcctgtaagaaagagatgagctgattttcctgcacaatgtcagcatcattcagctgttttttcacctcggcggcaaggtcttttgtatcctcggagacgatgagcgctattttgctgaatggctcggatgaagacactgcctcgcaaggctcccatgttttctgcaatactactgttttttgattcgaaagcggcagctgctcccgtttcggcacccaatagcggtctgctctgaacggataggagggcaggctgatgcggcgaggcttactgtccgtatacagctgctcccaatctgtgtcaaatccgtttacccagagccgcagcactttcttgtatttctttttctcaatccaggcgctgacgaggtcagctgcgtcttcatcgtctgagaacatggagatcgtgttattctcgcgttttttacggccgctgatgatatcttcgctgttttttcccgtcagaaacgcgttcagtttttcagtcagttcctctgcggagcctgcaatgattcccagcctcgcttccattgcgtcccgtccggtctgcagtgtgtatgcaacatctgcaagatcgatatggcgggatgatccgttttggataaaatcgcgaaggagacgcgctctttctttcagccgctcttcatttttagccgacaaaacaaaaagagatgacgctttctcacgggtttccggctgttccgtctcacttttgcccatgtattcttcaataacgatatgcgcattgacgcctccgaaaccgaatgagcttacacccgcccggcggggcaggacccggccgttttcatcacgcagcgcttcccactcctttgtttctgtcacaatgtaaaacgggctgtccttcaatttgatatggggattgatgttctcgcaatgcagacttttggcgagcgtccgatgtttcagctgcatcaatactttgataacgcccgcaatgcctgctgcgagctccaaatgtccgatatttgtcttcactgagccaatcccgcaatatccgcccggagccccgtctgtttggaaagcttttttcaatgcattgatttcaatcggatctccgagcgccgtacctgttccgtgcgcttctatataagtgatcgttgacggctgaataccggctttttgataagcgcttttcagcacatccgtctgagcctgcgggttcggcgcggtaagtgacgctgagcgtccgccgtgattttccgctgtaccgcggatgaggccgtagatgtgatccctgtcatgctcagcctctgaaagctttttcaagacaatcatgccggcaccctctcctctgacataaccgtcagcctgatcagaaaatgttttgcagcgcccgtcttcactgagcatgcctgctttttgaaaaccgatatgcccttctggcgtgacgatcgtgttgacgcctcctgcgaccgccatatcacaatctcccgtttcaatggcttttaccgcgcggtgaatggcgactaaagagcttgaacaagcggtttctatcggctcgctcggcccgtggatatcaagaaaataactcattcggttcggcccgacggacggcacgattccggtcatcgtatacccctcgacaggaagacccgccttattgattaaggtttgatatccgcttcccaatgtgccggtgaaaatgccggtttttgttccggcaatccgttttgccgagtaccccgcgtcttcaatggctttccacacatacatcattaataggcgctgctgaggatccatcatttcagcttctttcggagatatcccgaaaaacagcgggtcaaacccggcgattccatctataaaaccgccccatttaattgacgttttatttgcatccgctgccggatcgccgtaatattcgcgccaattccagcgatcccggggaatttctgtgatgcaatgctctccttttgataaacgtgtccagaattcatctatgtctttcgcttgcggaaaaataccgctgattccgataatggctatcggttcggttttttcttctgattttccttttacggatacgggcgtttcccgtttgacatgaacggccgccggagcttcagcttttcttattccggcttttggggcggttttaaaattctctctttctaagccgctgaatgcttctttccattcagatatcaaatggccgctcagtttgcgcaatgtcggaaattcaaagaagatagtcgggctgagctcaagctgataagaccgatttaatagatttgtaaattcagtgaagatgatcgaatcaaatccgtattccgtcagttcgctgtcagcctcaatatctttcatgcttacctttaaaagatctgatacatgacgctttagtttctcttgaacccgatctttcagatctcctgcatctgtctctgccggagcttttgcggcggcgctttgttcttcacgcagatcgaaaacatggctgcgaatccgtttttcatctccttctgccaccatgatctggtgttctccggaggcaaaagcggcgtaaagcgcctggatgcctgaagccgatcgcatggctttcattccggtctgttcatacatcagccgttcggtctctttgtccacgcgcataccgccctcttcccaaagcggccagttgacggacagggtctgcccgctccgcttgttgtcccgcacgagacgatttcggcgggctgcatatacgtccataaatgcgttggctgccgcataaccggcctgccccgggtttcccatacctcccgccaaggaagaaaacagaatgaaaaagtccagccgcgcatctttcgctgcttcatcaagattgataagccctttcaccttcggcgccatgacggtcttccgttcgttttctgtctggttcagaatgtaattgtcggcgatcacgccggcgccgtgaatgatcccgtcgagtgttccgtgctcctcctgtatgccgcggacgagggcgatgaccgccgccctgtctgtcacatcaaccggttgatacagtacgcgggcacccgacgcttccaagcgccgtaagcgggcggagcggtctttatcaagcgcttccgcccttcccgttaatatgaggacggcgtttttgacgcgggaggctatttcttcagcgaaaatcagcccgatgccgcccgctcccccggtgaggaggtaaaccccttcgtctttccacggaacggcgccgctttgaagcgcaggcaggtgacgccagtttctgacgagacgtttgccggcttcataacggatttccgcttgttcagggtgcgtccggttttctttcagcttggcaagaagcgatgatgctggctcgtccggatcggcttggatgacttggccgtacagcttcggatgttcaaggtgagccgttttcaggaaagcggccagccccgccaatacattgtcttcccccctgtcggggacaagaagctggatcagcgtttttcccttctgtttttctttgataagacgcttgacgatcgctgacagctccgccgcgcaggcgtcataacggtcttcaatcggaccttccccgtcagccgcacatacggcgccgtttatgtcctcagcgttcattccgccatacagcgtcacgtatctgaaagactctgcttgtccgccgccttcacccggcggtgattcctgccactttggctgaagcaagagcggttttccctccgtttcctcttccagaaaacgggcggtgagccccgtcaatcggacgcatacctcgccgttttcatcacacagctcaatatgataggcgccgtccgctgaggaaagcaccgcccacatcgtctcccggcacgcagaaaacacctgcatatcccggagggcaaacggcagaaacggccgtccggacgcggaaccgtctgagagcacgagaccgatagaagcctgaagggcggcgtccagcatgctcgggtgcaggaagaacggctccttttcttcgcgggcggacggcggaagagtgagcttcgcgagcacttctccgcttccggcatagacggcgtcaagcgcctgatgagacggtccgtaggtgatgccgaggctgtcgaatgcttcataacactcagcctttgacatgtgccggccgccgcagcgcgcctgaaccgcctccacatcgagtaccggagcacgctccgtctcttcgagcacggcctttccctggaaaaagacaagcggctcttctccttcggcatacgcttcaaaagcgatgtctccgttttcttccggctgaagttttacatgaagcgtcacgccttcagaaagcgccgtcaccggacggagccaaacgatctgtttgagccggacacccgcttttccgcccggcaagccctcagcggcaagtgtaacggcggcccgggccatttctaaagcagccgcgcccggaagcaccggttttccattgacgatgtgatcggcaaaaaacggttcacgccctgaaaaaacagaagtaaagcgctgggcggtaaaggtcgatgtattcgcatggagcagcgggtgaagcttttcacgttcagctgaattccggctttcaagctctccctgaagacgatcggacgcccaatacgtctgcctggcaaacgggtagcccggcagattgccgattcgcggcaaaggtccgccataaagcaagtccccttcaatttcataaccttgacaataaaaatctgccagcacgcataacagttcctgatattttctatggtcagaatatgaagcgctgcacttgccgagcacttctattatgtgctcctgaatatgctgtcggcctgcaaagtgctgcggtacttttcccgaaaacacataaggatgatgttcattaagctttgcctgcttccatacatacactgcgtcatcagcatcttgaaccacgatggcggcgcgatggttaaagtgatgccgtccttttagcaacgtatagctgagctgggctagatcattttctttcagtccgccattttccgcccaagtgatcatatcttcgattttttcctgaagggcctcctttgtttttgctgataaagtcagtaaataagcaggggcatccggatgaggtgaagcgctgcgcttatagctttccataacgacatgggcgtttgttccgctcatcccgaatgcgctgactgcccccattcggtttttacccggcagagaaggccacgctttagccgttttattcacataaaaaggacttttctcccagttgatatagcggttttccccgctgcaatgcagactggcgggaatcatttcacgggagaatgcctgtaaaagactgatcaaactgacaatgcctgacgcggcaaacgtgtggccgatattggttttaattgatgtgagcgcgcaaaatgcttcttcgtttgtataggcagaaaatgcgtcataaagcgcgttaatttccaccggatcaccgagttttgtacccgtgccgtgtgtgacgatatattcgatatcttcagggttgatacggccccggtcataaacggaagtaagcagccgggtctgcgcgacgccgctaggagcggtaattccgtttgttttcccgtcataattgatgccgctcgcccgaatcaccccgtaaatcggatcgccatcttcttccgcctctctcagcggcttaagaacaaccgccgcagccgcttccccgggaaccaggccgtcagcccttttatcaaacgcgaagcatttcccgttttccgacagcattccggctttatctatcgtttcaaaaaagtccggggtattcatgatattcaccccggccgcaacagctgttgtacactctttattctgcaggcttaataccgcctgatggacagaaacgagccccgaagaacatgctgtatttatcgccatcacaggacctgataaattcaagtgataagccagccgcgccgccaaaataccgttatgatgagacgtgacattgcctttgtcccgtgttaaaaggtgataatctccttcttccgcacccacaaacataccgatcgtctgctgcctgatgtgactggcgccgtagccggcatcctcaagggcccgccacgcttcctgaagtagcagccgctgcttcggatccatcgtttcagcttccctcggcgatatttcaaaaaataaagggtcgaattcgtccgcccccggtacagcgccgagtttccattttgaacttgtgaagcctttttttgcgaccggtgcgacaacgtccttttcctgaaacagaatgtcccacagctcgtccgccgtgcgcgcctgaggaaagcggccgctcatgccgataatggcaatggaatcagctgcctgactgccctcggttccggcgttcagcttatttcttcccctctgcttctttcgcttttccgttcctgccttttcaaagacagattgatctgcggattcaggtttcttttcttcatagacatgctctatgacggacttgtgttccgtcagaaaatagcggacgaccttctccagtgtggaatgtccgaaaaacagggccggggtcacttcaattccgtagtgagcggacaaagaagaggcgaattccgccaaactgatagaatcaaagccgaaatcagccagattgtcagcatccgtcagtctgttcttgtctattttcaaaagccccgccgccagttccttcacatcccagcttacgcattcttccagtgtaaagcctttcatttcactccgccttcctgaaaacgggacgttcctatttacagaacccgaaatcggccgttcgccttgatctatctgcaggaagcgtttggccctcgacggaaaaccggccaggacgagatactggctggacggctggactaacaatgtttcaaaagcttcgagtccttcctttgtatataaataacgctgtccgcttgattttaaatacatatcggtgctttccgccgtgccgacatgcatccccccttctttccaaagcggccaattgattgcaagtgacttgccgcttctgagtccgaggctcacaagtttatcccggtggcggataaaagccatttggaagcggttccccattgcgtagtcacaagaaccgaagtctcctaaaatcgctgaagaagaagagaaacaacagaagaagtcaagcggctcccgtgacagaacctgatctaacaccgctgtgccgtccgtttttggcgataagacttgctgaaaggtttgcagatctttctccagaatgctttcagtgccttgaagacctgcagcgtgaatgacaccgtgaatcggcccgcatcctttctctttcgcttcttgcaaacctttctccatctgagcctgatctgcggcatccgcctgcacgtaaaacaccttggcgcctgattcttccaatctctttatcttgtgcagcaccgggccgcctgccgctgatctccccgtcaaaatgagcgtaaccggtcctttttcagcaaaatatccggcaaataacaagcccaaacctccgcatccgccggtaatcaagtacgtttttccgctttttatcacacgcctctcaacaggggcaatatccgtctgcttcatttccatgacgtgacggatttccccactgtacatgacactgcggaacgacccgctgtgaagctcttcacatacattatggatcagcttttcaaacggtcctctttgtccaaaataaaccgcggccgtatccgtctccggcaggatcagtttcagcgaccgttccagcccgatccatgactcggcgtaactgatatcggtttcggtcccgcactgagcggaaagaaggatccgcctcggtttagaacgcaaagaagcagctgcgcggatcacatgatacagaatggaatagtctttcacggccttttcatcttcaagcggccatccatacaaaacggcatccgccttgcctgcagccgtttcaatatgccgaaacgtttcttgatatgcttgtccgtcagtgattttaatttgataatgcgtgtttgaaagcttttgagtttcctcaccctgtgaaataaaaaacacgccggctcccggataaagggattgtaaagaccgataagcatgttttctggcagcttctcccgtaagaaaacagatgaccgttttcagctcttcatgaatggatttcttcagaggctgctgcgtccacctttcttcaaatatcatcatctcggagtgttcctcttgcccgtgatcctgctgagacggctgtctcattctcacccctttgatttctgcgcatacaatgccggtttcgtcacaaaattgaatgtcacagccggtttgattctttttattcatatacatccacatgccggatgaacacggacgcatgacgcgcagttcttcaaccgtttcaggcacgatatggactgacggctccgtttttgccaagacatgaaaagctgcgtccagaaattccggcggtagatgatatcccggattacggccgctttcatctgtaagagcaagcttcgcccaaatcgcattttctcccgtataaagcttttcaacggtgcggaactccttactgatcgttacacctgatgtgcctggtgtttcataatcgaatgacagcgggcgacagtctttttgtaaggaggcaatatcaagcatgcgggatggctgtacgttcccttgaccgatgattccataatgatgcagcttctcttcatcactgtatatttcataatggatgccttcctcgtcttcagacagaagggagagattgacgcccgcaccgtgatgtccgccggtaatcgggtcagtccatgccgccgttcggatccatatctctttttcttcagagctgtctgccgcatgatgataagccgcaagcgccatttctaaataaacggctgccgacagaacccgctctcctctcacatcctggaaaacgtgttcccggcctgtaaaagatgtatgatagctttgctccgccaaggttgacgtattttcatgcaggaaaggatgcacatattcagttgttcctgtttttggttcttcccgcttcatccagtagctttcttttgcaaatggataagacggcagactgatacgatgcggcagcgcgcctttatataaagatgcccaatcgacgggcgccccgtggacccaggcattcaaaagactgccaaattgacgtttttccatccaatcaccgactgtgccttccgtctctgtgacagcactatcactccggcccgtaaacaccccgcttacggaatcggcattattcagaaaagcagtcagcttctgttccaattcagaaacagagtccgctgtcatcgccagccgttcttccatctgaaccctgccgacttgaagggtaaatgccgcgtcaagcagatttgcatctgtaattgttccgtttccggcggcatccgacagcaacagagcccgctcgcgcaagcggtctttatcttttgccgataaaacaaaaagcgccggacggccggagtccgccgaagtcatttcagccggttcatactcttctatcagcagatgggcatttgccccgcccgctccgaaagaagatgtacccgcgattctcggatattcccgtgttactccttcagattctatgaccggccgtctccattccgccgtttcctgctgcacgataaaaggagaagtttcaaaatcaatttccgggttcagctgctttgaatgcagcgacggcaccagatatccgtgtttcatctgaagaagaattttggtgacggcagcaatgcccgccgcactttccaggtgtccgatattggatttaacagaaccgatggaacaaaattgctttgcatccgtatagcggcggaaagccttggttaaccccgcgacttcaatcggatctcccaaggaagtgccggtgccgtgggcttccagatagctgatcgctctcgggtcaattcctgcccgctccatcgcgtctgcgatcacttccccttgtgcattcggattcggaacggtgaacccgttcgttttgccgccggcgttcagagcgcttcctttaatgacaccgtatatatgatcatgatcttcaacagccttcttcaacggctttaacacgatacagccgacgccctctccgtcaacaaacccgtcagccttatcaccgaacgctttgcacgcgtttgacggcgacagcattctcatagaagacagtccgatataatgaaccggatctgtaatcaggtttacgccgccggcaatcgcgcattcagatgcacctgttctgatgctttctgcggcgagatgaatggcggttaaggatgaggagcatgcggtatcgaccgcgatgctcggaccgtgaaaatcaaacacataggatacgcggttcgggataaagtggtagtgggcccctgtcggatagttgccgttcatgacacccgcaaaaacaccaacctttttaccggcgcatagtgaatcaggggtatatccggcatcctcaagggccgcataagcggtttccagaaacagtctctcctgcgggtccatgcgctccgcttctttcggggagattttaaaaaacagcggatcaaatttatcaatgtctgttaaaaagccgccccactttgtatacatccggccttccttaccttttgtctcatcatagtagtcccgccaatcccagcggtctttcggaatttcggtgattccgtgttcaccggtttttaaccgttcccagaactcattaacattttcagctccgggatacttcccggcaagaccgacaattgccacttcaaggtgttttgacggcggttcggaggcgggcggcgctttttcagaaaaagatgccgcttggcgcttcgtcaatccggcgctttttttgcggctttgctttttctgtagagtgtgcggcaccttttcggcttctttatttgtcttgaaaatcccagccatatcttcctgtcttgagctgacgagatattccgctaatccgccgattgtcggatactcgaagaacaatgtgctgctgatatcagggacgtcttcccgcacgcggttggtcagctgtacgattaagatggaatcaattccgtattcttcaaggggcgtatgggcttgaacgtcctcaatcggcatctttaagatgacgctgacgatctgtttcagatactctgtgcttttttcaagcaaagagcctgatgataccgcttcagtatgacggacttcttcagaaaatcgcgcaagcagttcgcgctccttcgtttcagccaagtatgcggcaagctcttctatcgttcggtgttcaaaaaacagcgtgctgctgatatcagggacgagatcccgcagctcgttcgtcagctgaacgatcagaatagagtcaataccgtattcatccagaggagccagcggatttatctcttctgccggcatttttaatacttttgccgcagcccttatcagaaaagcagctgtcttttccgaaagcccttctcccgcttgtttgatggggagctgacgatcagagaatgttcgcggtacgtttgattggcgcttttgcgcggtgtaagcttccctgctctgcctgatgactccgttgcttttcgccgtgataatctgctgggtgtgcagacgttcgttttcagccggaaattgaatggaatgaaagccttcagccattaaaaccgatttccatgtttccggataaagaccggggcaccccggaatccgcagcgcctcgtcttcgtacagccaccagccctctaataagccgaatgtaacatgtgtaaacggcgtatgtccgcccagttcattaacgagcagcaaaccgtcttttttcaatacggcttttgccgtccgtaaggttttccggatatttttggtggcatgcagcacgtttgcggcgatagcgatatcgtaggttctcagatgtaatccctggcccgccgcaggcttctccacattaaacagctgatacgtcaaatacggattgtccgcgccgtattccttttcggcatgcattaaaaaagcttttgacaagtcggtataacagtattcctgaatatggttttgataggggcggagctttttaaacagtgtgctgctcgttccgccggtgcccgctccgatctccagcagacggatgtttgcctcaggattgtttttaattacattttccacataaatacacgcttcatttgccatcacatcgttgtaataatcagcgagaatgttatgcttatagattccttcaacgagctccattgaagaatcgggaaacatcacgtcagtggcttttattttgcctgttaaaatgtcaggcaaagcttgaatgacggtatccgccagcagagcctgcgctttcatatccggatctttcagccattcgtttttcttcttatgccactcttcccaaatcgcggccgtttcaccgcttttaagatcgctgtctaaaagacggatgctttcttccagccagcgctcatataaaggcagacaggaagccgccggcgcttcgccggtcagacccattgaacgcagcgtcacccgcagcacttgcagcaaaagctgattcaattctttcatttgattgcttatttctgttcttaaggataactgtgtacggtctttttgtttgtctcccttacccaaaaccttatcctcctaagaaaattaaatttgctccgtcattttgacaggcaatcagatagtcacaaattcatgagggttcattccctcgatcggaatcggcttggtcagcttcatcagccccatgcgggagatcggctgcgtcagcagagtttccagcgcctgcatcccttccgcccggctgatcagtccgagaccgattgcactcagtctgtcaaactcttcagaaatgtgattgtcagcccgctcccaatacccccagttcatcactttgaccgggcatgacagccgcccggaaagctcatgggcaaatgcgtctttaaatgcgcaccccgccgcataatgactttgattcggattcttaatatatgaaataaccgaagagaaaaagagaataaagtccaaagactctttcgcaaatacttcggcaatgttgacggaaatatccactttcgccgcaaggccggcgtgaaactgtgattcttccatatcttttacgctttcattcgcaaataccatcgctgaatgaacgacgccgctgatggtgccgtatgtgtttttaatctgttcataggcgcgctgaagcgatggaagatcagaagcatctgctgctatatattcgggagccgggcctgatggccggtaccggtctattttttggcgtatccggctgtccagcggccgcctcccgatccagacgactcgggctttatacgccgtcaccatataatctgtccaaacctcgccgatgcctcccgcaccgccgatgatgacatatacgcctccatatcggtaaggaacactttcagacggcccgctttggaccggaagcaattgaggccggtgccattcctgatgtctgcgcacccatgctttacccgtacggtcgcggggcaggctgaatatgtcttctgcagggaaatccccccgtcttcaagatcgaccagacggatgtgccagctcggatgttcttttgcgagagacccgacgaaaccgtgcacactggaatgagcgggacgcacctcatcatattgggtgataggctgtgcttggtgcgtaatcaccgtcatcccgagctgctcttttccatacccgagaccgataagagctttggccgctctgaaaatttgcagcaccccgcttttttgatcatggatgtaagaatcagccggctgaggggcaaaccagatcatatgctgaatctcaccgacacggcggagccgatcggatatcacttcaacggaagcactttggctgctatcaaatcgcacagctttaggaaacaatcgtaaaaccgcgtccgcctgcccgtctgtaccgcctatgatgacagcttttgcttcagaaatggggaagccggtttggttgtctatcggttccgcgtcccatacctgcatcagtttgacggctccggtaaggttacccggcagatcgtattgcttattatcggttacggccggcgcactttcggccatccgggcagaaaatccttttattcttacacacacattgccgcgttcatcacatatatcaatgtccattcttcgcacggcccgtgtttcatgcgtcacaaatacggccgcccacatgtttggactgcacggatgaaaaacggtcagttcatgcaattcaaaaggcattaacggctgctccggataacccgctttatcttcattcataacgccgatggccgcctgaaaagcggaatcaatcagactcggatggagcacaaactgttcggcctcatcacaaacggaagcagggagcaccaatttagccaaggcttctttttccccgcaataaatgtgatcaattccttgatgtgaaggtccgtatacaatttccgcctttgcaaatgccgcatagcagtcttcttttgacagcacttttttgcggcagcgcgctttcagctgttcaatatgcaaaaccgccgcctcagacagcggctcaatcacagcactgccttcacaataaatgtctgaatcgttttcattgctgtacacttgaaatgaaatattgccgttatcctctaaggaaagacctgtcgtcatacgcagcggctcttttttatgaacggcctggcgtatccagctgatataccgcagcgaaatgccggttttagccgtgtattcagcggctaacggcgcggcagccagttcagccgcggctctcgccatttcaagataagccgccccggggagaacacgcttgtttcggacgatatgatcggctaagaagaattcatctccgttcagtaccgtgctgaatttttgttctaacaaatctgatgtattgcggtgaagcagcgggtgaagcctgctttctgtatttacggaagtgacgggatgatcgggctccggtatccaatagcgctccttcgcaaacggatatgtcggcagactcatcctgcgcggtttctcctcccgatacagccgcgtccagtctatctcaaatccttttgaccacagctccgcaagttttttgtaagtgccgctgtccgtccattttcggatcagctcctccgtatcctgatcatcattcaggaaacccctgatttccgttccgctatcagaccggccttgaaagcagccgtcaatctgccgttttcgttctgtaaattcggttaatttcctgatcaggtccgcttgatcgttcactaaaaaaacaagccgttcttccattgccagccgtcccgtttgcagcgtatacgccagtgaccgcagggaaaaaggttcatcagactgcttctctaagccggactgaccgaaaagaccggaaagaatattcttatgtttctcatcgtttgtcagacattctgctaaagtccggacggaagtatgctgtatgagatcagtcatgtctattgccagcccgtattgatccgtcagccgctcagaaaactgtgtcagctgcatgacatccaagccgaattccttccaatcctgttcaccatctaccgagccggcctctacatgcagaacttccgccagagcaccgcgcagcgcattttccagctgattttgcattgtatctgttttgtcataaagcgacccgcttccttcaagcgctttatctttgagaaacatcagcaggcgggcagcgtattccttcagccgctccggatttttcgctgatagaggcacgatatacggtctctcttgattctccgtaatgccggggtttttgggcctgtactcttctaaaatgagatgaacgtttgaacccgtcgccccgaatgaactgatgcctgcgcgtctcggacaggaatgttctctgccgttctctgtatacgccggctttttccatgactcggttttttgctgcacgtaaaatggcgagtcctctaaacggagatacggattaatcgtctctgagtgcaaagaagggacaagcgttttgtgaaacagctgcaaaaccgttttatgaagcccgctgattccggcggctgactccgcatgtccgatattcgatttaacggaaccgatcgcacaaaattgccgatcctccgtaaacgtgcggtaagctttaacaagaccttgtatttcaatcggatctcctaaagaagttccggttccatgcgcttccacataagaaatcgtcctgggatcgatccccgtcttttcaagacattcagctatcatatccccctgcgccactgggctcggcacggtaatcccgctgacggttcccacgtgattgacggcgctgccttttatcaccgcataaatatgatccttatcttcttcggctttgtgaagcggcttcagcagcacggccccgatgccgtcagctgagacatagcctgtgccgccttcgccgaacgtgcggcacagcccgtcactcgaatgcatatccatcaagccgtatgtgatatattttgtcgggtgcaatgataaattgacgcctccggcaagagctgcttcacattcaccgcgtctcagactttccgccgccatatggacggccgtcagagatgacgaacacaccgtgtcaaccgccatgctcggcccgtgaaaattgcagaaatatgaaacccggtttgcgatcggcgcatagttcaagggataaggaaagaccagccctttggccgcagcttcagcgccggcgagagaataatccatatgcatcaccccggcaaacacaccgacgttcattctcttattcggccctttcggctgaacgattgtttccggggtatagcctgcatcctcaatcgtttcccagcatgtttctaaaaacaatcgttcttgcggatctttagcttctgcctcccgcggagaaatccggaaaaatttcgcatcaaaacaatccggatcgtctataaaaccgccccatttggaaatcggcttgccggacggcgatcgcaaatgctcatatttcctcgtatcccagcgggaacgaggcacttccgttacgctgttttctccattttttaaatttgcccagaattcacgaagatttttggcgccggggtaccgtcccgccatcccgacgatcgcaatatctccattctgcgttccggctgacgccgattttttcacgcggttttgggtcgtcctctttttttcccggcgcaaaggttcagcatttggatgcccgctttgagcatggccgaagccggctccgtaatgttcgcgcaaatatcccgccaattccgcgattgtcgtgtattcaaataacagcgtcggcagaagctgcgttccgatttttcgttcaatttcctttaccatgtccaacagccccggagaatccagccccatttcatagtagccgatatccgggtcaatctctttcacaggtttgttcaatcgggcggcaagcaattcttttaaataaaggatgcactgttcagtaaggccggcggaagcctccgcacggcggggctcggaaggcgccggttccgcttgcggagccgggacggcattccgcccgtcaggttctttcttttgccgtttctgattgatcagttccgggtccctcacccgtttattggcgaagtttttcagttcgccgacttttctgccttcctcattgaaaaactccattgtcacgtaaacgagatctttcttacgtgtgacggattctttttttatcttggtgatacatgtcgtctgcagcaattcggcgcaataaaatgattcataaaacagcggcagaaataattgcccctcctccctcgtcaaaggagcgagatatacattggagccgatgctgctcgcatctatcaatgcgggatgaaacatcgcctcttctgcatgttccagctgatccttttgcaccgacagatcaatataaatctctttttcagtctggtagacgcttccgcagcctttcatcattcctgaatgaaccagttcttgatccctgcattccgcgtaaatatcctcaagcggtatttctgccgccgtttgttttacggcatccatccggacgctctcttggaagccggcgggcttgacggaatgcatttgcgccgcggcatatatctttgtctctgctgcttcgtcaccttgtttttgccctttcacctctaccttccactgcccttcgccgttctctgtacagtcaacggaaagcaggattgtttctccctgttcaggagctaaagggtgaaaaatcgataagtgcctgagttcaaggccggcatgaaaaaaaccgttttctctgaaagtctgatagatcaggtcaatataagccagacccggcagcagttcctttccataggctttatgatgtttcagaacgggatgctgattgttaataagaagctgctcttgcatatgaacttcctccatatcgacgttcaattttcagcgcaatcagtaagtcttcatttgtttccaaaacgtattcgggcgggattcatgtgcgttttcatgcaggttttcagctttgtccggacggatgggccggcgttttaattcctgtctcggcaaaggctttctaaccggggtatacgcctcctgctcccaggcttccactatgacatgggcattcgtccctccgtcagcgaaactgctgacggcggcaatccgcggtgaatccgtccattcacgcagaacgtgcgaaaaataaaacggcgaggcggacagatcgtaatgcgtcatcggctctttgcccgaaaggaaaggcacacgcattcggcgcgagagcataagcactgttttaatgaatccggcaatcccttcagcgcataacgggtgtccgatattcggcttcatcgaccccaattcgcaaggcgcgctgttttgcatacggtacaccgcttcaatcgccctcagttccaaaaggtcggttacttcagagcctgaaccgtttgcttcaatgtagctgatatcctccgcttttctgccgcttttggcaagcgccttggccatcacttctttctgcgcctgtatattcggtgtggcaggccccgcggttctgccgtcattgtttacggaaatgcctttaatgaccgcatgaatccggtccccgtcttttacagcctgggccgctgtttttaaatacaccattccgacgccttctcccaatacgatgcctccggtgcggcggtcaaaaatatgaaacgcaggctcttcgcttaacagattgcgaagttcgaacatccggtgggtttgaccggattccagcagactgactcccccgaccaccgctgagtcgatttcaccgcaagaaagcgcctgtatcgccatattcataccgacaagcgctgaagaacaggccgtatccaaaacgagactcggccccttcaaatcaaagaactgagaaagattggccgccaagtaattcgggccggcggcgactatcggattttttgcatgcttcagacggttttcgtcaggcatactgccgccgcgtcctcctaaatagacaccggctgacctgcctttcatttcttgtaaagagtaaccgctgtctctgaacagatgaagcgcctcttctaatataagaaaggactggatatccattgccttgatgtcttcttcgggaataaggaaaaactccgggtcaaaatgcgttacattttttaaaaggcccgcataatccgccttctccgttttccagcgttctttcggcaccctttgaatagccgacgacccttcagacagcagcttccaataagcttcaattgattcagctccaggaaaacggcaggacattccgacaacagcgatgtcttgcgccgctgcagcgccagaaggctgaatgacagcggctgctgtttgtttgggaacgtccgggattacaggctgaaccggttttgaaacggcagctttgatttccggatatgccgtttcaagccatcccgccagcgcagcaaccgtagggtattcatacagcaccgccgggtcaaggtcagctttgatcctctttccgatcgctctggacacttgggcaagcatgatagaatcggctccgtaatcttgaaacggtgtatcagattcaaatcttgacggctccagtcttaattcccggcagcaaatgcccgtcagccactcctctacgctttctgtctcaccctgtacatgctgctttgtttcggtaaggccggttgaaagcatcagacggtcgggctcccatttttccgggtgaatgacggccggcataataacagatccgcaatcgcctgccataacggcatcaaacaggctcagcccatctctgtcagtgatgctctttaaaccgcttttctgataggcccggctttttgattcgcccatacccgtttctttccagctcggccattggatgctcagcaccggaaaaccttttgcggccgcaaaataatccatataggcgttagccatggcataatcgctttgtcccgctcctaattccggcatcacgccggacactgaagaaaacagcgcaaaaaaccggagaggctccttgtgcagcgcttgatacaaaaggtccagtccgtcagttttaggttcaagcacagtcatcatctgttctcttgttttgcggataaaggcgggatgatcgagatctacggctcccgctgcgtgtatcacgcctccaatcggtcccatcttctctttcacccggctgacggcctgctcatattcagggccggaagatacagacagcacttccgttcggacacctttttgttcgagctctctgattcttctcactttatcggaaaacggggaattccgtttgatatgatcatcccactccgctttcggaggcattgtttcttttccggtaagcacgagtttcgtgactccgtaacgttcggcaaaatgccgggcgaataaatatccgagtccccgggtccctccggtgatccagagcgcatggtctttcggaaatgaaaattctttttcagctaagctgtttgtttcctttaaccgcgcgtgatagcgcacaccgtttcggtaacacacttcgatgtctgcagaatcgcgaaaaaactcctctgcgatctggtttgccagctcggaatcttcggcagtccgttctgcatccatatgccgcgagcggatatccttatactcactttggagcatccggtacaatccggccttttttgcacctgagagatttatcgtttcattcgcaaaaggttcaagcccctttgtcacacaaagcagctgtagctttcggccgcggtttctgttgtcgatgagagactgcagacgatgaatccagccgtcatcatgcttgatttccgtcccgcatcccgtcacatcaatcagaccgccaaaccgggccgcgtccccggatatttccggtgatgcagcgtcaatgatttcagactcggggaaataacgggacagctcaacggccaaatttcctgtctggtgatcagcggctattccgatgacgccccgcacttccttagccggaacacggctgctttctgcccagcttttctgtaaaaagcggaattcacgaaatgtttcagaatgtgtttcagcaccgcgaacattgtccggcgctgcatcgtccggccaataacgatcctttataaatggataaccgggaaggctgacgcgatgcggcaggctgccgttataaagctctgaccaatcaatcttcagcccttttacccaaagttccagaagcttcgcgaatttttttcttttcatccatttacggacggcttcctgcatatcttcatccttaaaaacggctagaatatctttatactgtttgctttttcccctgaagcagccgtctgttccgccgtcaataaaacactgcagtttttccgctaactgctctgtcgacgtcacgataaacgccgcacgttcttccatcgcttctcttccggtttgaagggtgtaagccgcatcccggaggctgcggtctgtgacgtcattttttctgatcgcttgaagaagctgctgcgcccgctgcttcaggctggcctcctgtttggcggataataaaatgactgcgggatcttcatctgtgaatggctcagaaatctccctatcaggttcaatatattcttctatcaatatgtgggcatttgccccgcccgcgccaaaagaagagattcccgcgattctcggaatctctttctgcgctccgttttcctcaatgaccggccgtttccagtctgccaattcacgctgcaccgcaaacggcgtccggtcaaatgcaatattcggattcaagcttcggcaatgtaatgaaggggccagctttcgtttttgaaactggagcagcagttttgttacaccggcaatgcctgccgcggcttccaaatgcccgatattggatttaactgagctgatggcgcaaaagcctttatctgacgttttcgtttgaaatgcgcgggtcaaaccgtcaatttcgatcggatctccgagttcagtgcccgtgccgtgggcttcgatacagctgatcatccgcggatgtattcctgatttttcaagcgcgccggaaatcacgtcagcctgggcgctcggactcggcactgtatacccgtttgttctgccgccgtgattgatatgagtgccgcgaatcaccccgtaaatatggtccttatcagccatcgcttttgacagcggctttaacagcacggtcccgacgccttccccgggaacaaatccgtccccgccttcaccgaaacttttgcacgttccgtcttttgaaagcattcgataggcgctgagctccgcataagccgaaggatgcgtatacacattcacaccgccggcaatcgccatgtcacatgcgccgcgaaggatgttttcacacgcttcatgaattgcagtcagcgaagacgagcacatcgtgtcgaccggcatgctcggccctttcagattaagaaaataggaaactctgttggccgctgaactgaacgacgttttcggctgcagggtgccgccgtttttccagtacattccgtacccgtttttcgtaatgccggcaaaaacgccgacccggccgttatacagattctcaagctgttccttcgtataaccggcatcctccagcacctgccagcacatttcaataaagagacgctcctgcgggtccatattcaaagcatcacggggtgaaatttgaaaaaacagcggatcaaagaaagcggcatctttcagaaacccgccccgcttactgtaacttttccctgctttcacggccgcttcgggatcagggttgtagtacctgtccttttcccagcgctcttcgggaatttcggtcacacagtcttttccggccgctaagttatcccagtactcttcaagtgtttcagcttgcggataacgtccgctgactccgataatcgcaatcccttcttttgtctgtttctcattggaaaaagcaggccgttttcttcgcttgataaacgacggaagcaccggaaaatcttcatttgccaaaacctgttctgatatgcctgaacggtgctcatcatcatttgtccattttcggcattcattcggataatccgtgacaaagtgagctgccagggagcccagtgtcttatattcgtaaaaaaccgttttggaaaggtcaccgaaaagcagagacaattcgcggttcaatttcgtcacagtgacggagtcgattccgtaagtttccagcggctcttcagtatctatgttggaaacagcaatttttgcagtcaggccaaaaagcgttttgagctgaagaagcgtttgttcatacaaacgttcactgcggtgttcggcattggtttttccggaagcgcccgtcttgatgacaggctgcagcttcaaccccgacagagaagcccatatttttccttctccgtcacataaatcaatataaaagctccccgccttctcttgtatctcggcccataccttgtcaggacaagattcataaaacaaaagctcgtccaatgaaaccggagcgagcgttttatattctttgccgccaagcagcgcgcatgcctctgtcacactttgcatcacacagggagggaggccgaatcgggcggattctttttggtttgtcaatggaattgatatgtctgccagcatccgtcctgatgaagcgtaaatacgctcaattcctttcatgtgctcactgtattgaacggtatcgttctgagtgatggcttcaatttgctgcttatccatcagggaaccgctgttttccttcaagcggctgatatccagcatgccgggcgcagcatcaactggctgaatcgtcccttggctgtacacatcataatgactggaatcagcagaaaatggattataaatctcaaaccttttggcttcaccctctgcgggtatcagcctgatttcgatatggaacggctcagcctcagtcagaatgggctttgaccacacgatatgcgtcagccggacagccgcagtctcctttactgtcaaaacagccgcagctctcgccatttccaaaagaagttctccaggcataagctttttatgctgtaaagaaacatcagcgagaaaaaattcccggccgctgaaagctgccgagaatccctgtcccgtttcatcggaaatatgctgctgagcaagcggatgaagggaatccgtttggcgaagtcccatccgcatatcataatcgcgcaaaatgccgatcgcatcctgttttgtcatttttttatttttgacgtcagaaaaaacccggtgcagaaactctttcatatggtttcctccattacgctaatccctgtaaaaaccgatcgttctttttacagcggcttctatgcttatttcgtttttctccaattcatcaagcaggcgctcataagtctcaagcggggacgtatcagtcccgtaagtctcccggtgccttatatgctgcgcactgtgcggtatccagcaatgtgttttcgcaaaaggatagacaggcaggctgacttttttcggtctttcgtcctgatacaatttactccaatcaacatgcaagccttgcacccataattttgcaagcattgcatactttcctgcttcaaaccattgatctacggccccgctcatttctgcattgtccgtcatctctgtaaacagctgtttcatcgctttgttccggcctgtaaagaaattctgccccgtctccttgccgctgaggaaatcattcagcgcgttcgtaagctcttcttttgtttcagcaatgacggcaaggcgctcttccatttcatcccggccaagctgaagcgtataagcgatatccgcaagagctccgtcagctgaatgtgacttttccaaatatctgcgcagctgttccgcacgttccttcagctgttccgccgtctttgccgagagaatgaataaggacggctgaagttcaccggccgtccattgtttctcttcaacaggagaaacatattcttcgagcacgacatgagcattgacaccgccaaatccgaacgagctgacacccgctctccgcggcagttcatttccgctatcatcagtcgccgctttccacggctgagtttcgcggacgaaataaaacgggctgccgtcgaggctgatatacggattaacggtttcacaatgcagacttttaacgagcgttttgtgctgcatctgcaaaataatttttaaaagtccggccatgccggcggcaagctctgtgtggccgatattcgttttgacggaaccgaggccgcaatgaggctgatcgggtgccgttactccggctttttgataaagcgctgcaaaagccgctttgagtccgttgatttctatcggatctccgagcgccgttcccgtgccgtgggcttcaatataactcactgtacgggggtcgatgttcgcttgctgatacgcttttatcatgacttctgtctgcgctttcggattcggcgatgtaagggaagccgcccttccgccatgattttccgccgttccgcggataacggcataaatacggtcgccgtcacgttccgcatcagataatgttttcaaaacaatcatgccggcaccttcagctctgacatagccgtccgcttgatcggaaaatgttttgcagcgcccgtcttcactgagcattcctgctttattaaagctgatatgcatgtccggcgacacaatagcattgacgcctcctgcaatcgcgatgccgcagtctccggcctgaattgccctgaccgcacggtgaacagcgaccaatgagcttgaacaggcggtttcaatcggttcgctcggcccatgtatattcagaaaatagctcatgcggttcggaccgattgacggaaccgttccggcagcggaagaaccctcaatctctatatggaactttgaagcttcctgagcgtaaccgctgtttgtcgtgcctgcaaaaatgcctgtatttgtacctgacaggctttttgcagagcagccggcatcttcaatcgctttccatacatgcatcattaaaagtctttgctgaggatccatcatttcggcttcatgcggagaaataccgaaaaataaaggatcaaattgagcggtttcatcaatgaagccgccccactttacattgctcgcatttttatctttctgcggatctccgtaatactgtctccagtcccagcgctccggcggtatttcagaaatacagtccttttctccggctaaattctcccaaaacatttccggattttcagccattggaaatgcacagctgattccgattatcgccacgggctcttcaggttcagctgcggtttttgttttaggaaggcgggacggaatcgagaatggctccgtcttcatttttttacgctcaaccggtttctccgtttctgtttcttcctgtgggccgaatgtatccggatgttccgtcagcaagtattgggcaaaactaaagactgtcgggtattcaaaaaacacggccggcgtcagttcaagcccatacattttatttagttcatttgcaaactgcgtgaatgaaaccgaatcaaatccataatctctcatctctgattcagcatctatttcttcttctttcaccttcagaatgcctgatatcatatgtttgagttccgcttgtactttatttggcagatggacgtgggtcttccttgacacatgaatgctgcgtgacggttccggcgcttcaggcatcaggttttttcgaatccgtttctcgtcgccttctgccaccatgacctggtgtgctccggaggcaaaagcggcgtacagcgcctggatgcctgaagccgatcgcatggctttcattccggtctgttcatacatcagccgttctgtctctttgtccacgcgcataccgccttcttcccaaagcggccagttgacggacagggtctgcccgctccgcttgttgtcccgcacgagacgatttcggcgggctgcatatacgtccataaatgcgttggctgccgcataaccggcctgccccgggtttcccatacctcccgccaaggaagaaaacagaatgaaaaagtccagccgcgcatctttcgctgcttcatcaagattgataagccctttcaccttcggcgccatgacggtcttccgttcgttttctgtctggttcagaatgtaattgtcggcgatcacgccggcgccgtgaatgatcccgtcgagtgttccgtgctcctcctgtatgccgcggacgagggcgatgaccgccgccctgtctgtcacatcaaccggttgatacaatacgcgggcacccgacgcttccaagcgccgtaagcgggcggagcggtctttatcaagcgcttccgcccttcccgttaatatgaggacggcgtttttgacgcgggaggctatttcttcagcgaaaatcagcccgatgccgcccgctcccccggtgaggaggtaaaccccttcgtctttccacggaacggcgccgctttgaagcgcaggcaggtgacgccagtttctgacgagacgtttgccggcttgataacggatttccgcttgttcagggtgcgtccggttttctttcagcttggcaagaagcgatgatgctggctcgtccggatcggcttggatgacttggccgtacagcttcggatgttcaaggtgagccgttttcaggaaagcggccagccccgccaatacattgtcttcccccctgtcggggacaagaagctggatcagcgtttttcccttctgtttttctttgataagacgcttgacgatcgctgacagctccgccgcgcaggcgtcataacggtcttcaatcggaccttccccgtcagccgcacatacggcgccgtttatgtcctcagcgttcattccgccatacagcgtcacgtatctgaaagactctgcttgtccgccgccttcacccggcggtgattcctgccactttggctgaagcaagagcggttttccctccgtttcctcttccagaaaacgggcggtgagccccgtcaatcggacacatacctcgccgttttcatcacacagctcaatatgataggcgccgtccgctgaggaaagcaccgcccacatcgtctcccggcacgcagaaaacacctgcatatcttggagggcaaacggcagaaacggccgtccggacgcggaaccgtctgagtgcacgagaccgatagaagcctggagggcggcgtccagcatgctcggatgcaggatgaacggctccttttcttcgcgggcgtacggcggaagagtgagcttcgcgagcacttctccgcttccggcatagacggcgtcaagcgcctgatgagacggtccgtaggtgatgccgagactgtcgaatgcttcatagcactcagcctttgacatgcgccggccgccgcagcgcgcctgaaccgcctccacatcgagtaccggagcacgctccgtctcttcgagcacggcctttccctggaaaaagacaagcggctcttctccttcggcatacgcttcaaaagcgatgtctccgttttcttccggctgaagctttacatgaagcgtcacgccttcagaaagcgccgtcaccggacggagccaaacgatctgtttgagccggacacccgctttcccgcccggcaagccctcagcggcaagtgtaacggcggcccgggccatttctaaagcagccgcgcccggaagcaccggttttccattgacgatgtgatcggcaaaaaacggttcacgccctgaaaaaacagaagtaaagcgctgggcggtaaaggtcgatgtattcgcgtggagcagcgggtgaagtctggctgctttctcactttccgctgagcctgttttgtcaagtgacacatcagcttttgtgacccaatatcggtctttggcaaaaggataagccgggagactgatgcggcccgggttgcgctgataaagagctgaccaatcgacgtcaagtcctttaacccaaaggtcaagcagctttccgtatttcccttttttcagccaggcatttatggtaagcgccatatcttcatcagaagtgagcgaagccgccaatgaatgatgtttggctgtcctgccccgccagatatgagcatgttcgatatgatcgtttgagaaactcataagcttcattttcagttcttctatcgactcggccgtaaatgcaagccgctcagccatcggttctcttcccgcctgaagcgtgtaagcgattttggccaaatccccgtcagaacgtttttttcttatgacatcatccagaagctggcgggcgcgctctgtcaattgctgctcatttcgcgctgataaaataataacagccggtttttgcggagaaacagacgcgttttcccttggtttcaggctgtcagacggcacatattcctgaatgatgatatgcgcgtttgcccctcctgctccaaaagaggaaataccggcaattctcggatattccttcatttcacccgtgatattcaagacaggtcgtttccattccgtttctttttgctgtacgaaaaacggagtgtgctcaaactcaatattcggattcaattccgccgcatgcaatgaaggggcaatcctcttatgtttcaattggagaagcagtttggtgattcccgcaatcccggcagcgctttctaaatgtccgatatttgatttaattgaaccgatggaacaaaactgccggtcttctgttgtcaggcgaaaagctttcgttaacccgtcgatttcaatcggatcaccgagcgcagtgcccgttccgtgggcttccaagtaactgaccgttctcgggtgaatgtctgtccgtttcaacgtctctgcgatcagatcaaactgcgctttcggattcggcaccatataagcgtttgtcctgcctgctgcgttcagcatgcttcctttgataacgccgtaaatatgatcgccgtctttctccgcttgagcaagcggctttaacacaatcgcccctactccttcaccgtcaacaaaaccgtccgccctgtctccgaaagatttgcatttatcaccgggagacagcattgaaaaagcggacagccgctcatagtgagccggatcaacgataagattgactccgccggcaatcgctgtttcactcattccgctccgcaggctttctgcagcgagatggacagctgttaaagaagaagaacaggctgtatccacagccatactcggcccttgaaaattgaacaaaaacgatactctgtttgcgatagaccagtcgctgggaactgtcgggtaattgctgttcatcacaccgacaaagactccgattttccggctgtcacaaagcgtggccggggtgtaccccgcatcttcaatgcttgaataagcagtctgcagaaacaacctttcctgcggatccatcctttcagcttccgcgggagatatacggaaaaacagcggatcaaatttatcaatgtcatcgaggaaaccgccccattttgaataaatggacccccattttccgcgttcctcgttataaaacgttttccagtcccagcgatctttcggcacttctgtaatagaatgcctgccggcttttacattttcccacagctcatcaacgtgatcggcgcccggataccggcctgacagaccgatgacagcgatatcctggatatagggatctccgtttgtcctgctttcttcctcgttttgaggaattacattcaggttatctgtgtgatcagacagctgctcctcacgcacacccatcgctttcataaatgctctccgctgagaaagaagcaggtaatccgcgatttcttctatcgtctgatattcaaaaaagagggtgctggtcatttggtcaaacacgttacgaaaagcatttgtgagcctgacgaccagaatagaatccaaaccgtatgcggttaaggaaaccgacggatccattctcctgctcggaatctttagcgtttttcctattaattccgtcagatatgtgatgccccgttcccttacgtttggaatcggcgcggcgctttctgcgggagcctgcatccgtccggcgttttcggaatgagcccgtccattcccgaattgccgctcgagcgcttctttacgggaagacagaaagtaatcagcaagctcatcaatggtttgatattcaaaaaacaaagtgctgctgacagaaccgaagacgtcttttaacgcgttggtcagtctgacgaccagtatggaatccaatccgtatgcggttaaaggttcatgggataaaagacgatgcgccggcactttaagcgcttcaccgattaccttcttcatcagttcaacgcttttttctctcaagctgaaatgcaatgtatcatccgaaagaccatctgcgtcatacggacggcgctccggtttttcttctgacgcctgcgggagggcaagcctgaccgttccgtcactttcagccgctataatctgctggcctaagtcgtgtgcggcttcagccggaaacagaggatggacgaacccttcaagtgaaagcgcttccgaccagccggccggctcaacccccggacagcccggaatccgtaaatcatgatcctcatacagccaccagccttcaagaaggccgaacgtcacatggttgaatacggtgcggctgttgatctcatttataaacagctggccgtttttttgcagcattgctttcgcatggcgcagcgtagagcggatattttttgtcgcatgaagcacattggtcgcgatcactgcgtcatacgtgccgatgtccggcgcttctgttgataccggctgctcagcgttgaatattttataagtgacataaggatattccggaccgaatatgtcttctgcatgtaaaagaaatactttagaaatatctgtgaaacaatattcggcaatatgcgcttcatacggtttcaattttctcatgaccgcggcgctcgtcccgcccgttccggctccgatttctaaaatgcggattttcgcctgcgggtctttttccagacgctcccgcaaaactgcaatcaatgtgtcagcaagcttgtcattgaaaaaatcagaaatgatattattgcggtaaatgccttccacaagacggaaggaggagtcagggaacatcacttccgttgccggaagcttaccggttaaaatgtctggaagcacacgcaatgtctcttctgccaatctgacatgcgccctcatgtctttccggcgcagccaagtctcttttttccgctcccattcctcccacacctcccctagatccgttttttccggagcaagcgctaattcagtcaggaagacaaagctctctttcagccatctgctgtattgttccgttatgccggcagccgattgaaataacggcaaagtctcatcaagccttgcgcccatctcataaagggttgatacaagtattttttcaatgagggattccatctctctcatgcagctcatgacatttgatgcttttacccgctcagcttcgtcattctgcgtgatgttaaccgctaattgtccgagtgcggaaggaatcttttccggataaaccgttacttgttctttcagatcatctttcataaaaaccggatctgtcgttttgatcagcgccagctggtcataaggtcccgaaagcagggtttccagcgttttcatcgcttcgggcgcctcaatagaagcgattccgtcccgctccatccgtttccggtattgttctgaagcgacaacgccgacacttccccaaaagccccaattgacaacctttacggcatacggcgctttttgtgagatccgcttagcaaaagcgtctttaaacgtgcacccggcggcataattgctctgtcccggcgctttttgaaacgacatcatcgaagagaaaaacagcaagaaatccagcggttccccttcagctacccgggcaatctgcaagctgacatcagtttttgcagaaagtgaagcgcggaactggtcctcttccatattggcaaaactccggtctgataacacgatggcggaatgaatgattccgcgcacctttccatgttccttcacaatggtgtcatacgcccgcttgagagaatcataatccgcagcatccgcgctgaaatattgcggtgcgggacctaaagccgcaagtcttttcagctttctttcaatctgtgtatcttttttccgtctcccgatccagacaattttcgcctgataggtctgaatcatatattcagtccatacttctcctattccgcctgctccgccgataatcacataaaccccgccgtgccggtataatgaaggctcacctgcatgaggctggcagacggccaattgctggcggtgccactgacctgcacgaaagacccacggatttccctcggggtccgccggtaaagagaagatatcgggaagatgccggtctcccctttgagattccaaatcaagaagccggatgctccaattgctgtattcttttgcgagcgcccccgctaatccgtgtatgcttgcatgactcggattgacctcatcatgttcatgaatcggctgtgcttgaaacgtgcagattgtcaatgatagttgttccgtgtcaaaattcagaagcagaagcgattttaccagccggaaaagctgcatgaccccgtgctcctgtccgtcggccgtatccgcatcataaacggatggaatcggatgatccggcgccgcccatatcatgtgttgaaaagagccttgcgctttcagtgtttcagctatttgttccgcgctgtccaaagaagtgatgtccggaaaacggacatcggaatacatctctttcaaagcctgctgaaaatccggcccgcccccgatgacgattattttttcttcacgcatgaaagacatgccggtttccggaatggtgacggtgttccaaaccggtgtcataagcaattccgtttcacggcttttcttcggcatgacgccggctttttggttaaacccggcgctttcctgcacctcttttatgataaaatctttcactgccgccagcagcacaccgcgctcatcacaaatatgcagatcaaattggtgaacggaggccgcttttacctccgcatgcacaaatacggttttcgctaacggtttaagcagctgtatttctccgaaggaaaacggtacgataagcgcaggctctttttgaaattgcagcacatgcgccattgcagtttgaacagcgccatccagtaaggacggatgcaggatgtactgtttaaaatccgcttccaagtgtgacgggagcgttaatttggccagtgctttcctttctgtataagagaattcgcggatgacctgaaaactgtccttttgcacgattcccgcctcagagaacgagtgatagatgtctttcggctccgttctctgcgtaaatggcgccggaagctgaaagaccggggcctcaaacgacgctccattttctttacaaatcacttctccttgcgaaaagagagtgccgtccgctcctttttccttaatgacatagcttatacgctctttttccgcttcaaactctatcatgacggatcttgggtctgtccctgtcacaatcggctccatataccacacattttgaagagagacgaccgggcgttctccccacaatgccgcgccgtatgccgccatttcaagatgacagactccggggagcacatatttttcgttcactaaatgatctttaaagaaatattcatccttggaaaatatcttttgaaacgtccctttccgggcggatgaaacattctcatcaagcagcggatgcagcgcttcacgccttttgacagattggggctttttcgtataccgctttttttggtcggtcagccaggacgtttcctttaaaaacggatacgtaggaagcggaactttctgatacggcgtctccggctttttgaaaccttgaaggcctttgacccacagcgcggcaaatttttcaggatctgaaacggattggcctgaaacgtccggccgtccgggtgacgcttttccgaagtaaatatgcctgccgccgctgtgcccgctcacaaagccgtccaatcgctgtttcagctcgggaagggatgacgcaatgacagcaagccggaaggagaaaggctctctgcctgacaatagggtggcagcgatattttccaggctgtatccgccggcagaaggcgagttttccaatcgggcaagaaaggagctcaattttccggcatattctttcagctgctgttcggaatgtgcgcttagtacgacggcatgcggtttttgctcagtattcccgtccgcttgccgttttggctgataagcacctacgatcagatgggcattagagcctcctgcgccgaatgaactgattgcggcgattctcggtttatctccttcagccggccacggccgattgtttcggacgacataaaatggcgaatcagaaaaagaaatcttgcggttcagttcctcggcgtgcagactggcgggaagcgtttcatgtttcatgcttaaaagcaccttgattaaaccggcgatccctgcagccgcttccaaatgtccgatattggatttcaccgagccgattccgcagtcatttttctcatcggtctgtttctcaaatgccatagacagaccgcgtatctcaatcggatcgccgagtgccgtgccggtaccgtgagcttcaatgtagctgatatccgccggacttaccgcggctctgtttatagcggataaaatcaggtcccggtgcgcttccggattcggcaccgtatacccggtcgttttgccgccgtgattagtggcggaccccttaatgacaccgtagatgtggtcgttgtccgcaatcgcttttttcaatggttttaacaaaacggctcccgcgccttcaccgggcacgtaaccgtctccgccttcaccgaagctgcggcattttccttcagaagacagaaaatgcgattggcttaaaaacatgtatttttgcggatgtaagctgaggttgacgcctccggcaagcgccatttcacagtcgcccgacataatggcctgacaagcctgatggacggcgacaagcgatgaagaacacgccgtatcaacagcgatgctcggcccatggagatcaagaaaataagaaacccggttcggaatgccccaatataaggagccggggcctttatactgatctttgaggaaaccttcttcgtgtgcaattaatgaatattcattccaggtcactccggcgaatacaccgatttgatccgtcggcctcgccgccgggttcccgtaaccggcatcctccatcgcttcccagcagcacgtgacatacaatttttgctgagggtccattaaatcagcttcccacggggaaacagaaaaaaacagcgggtcaaatcgatccggacgatcaataaaacctccccatttactgtatgacgcgtattttgccgttttctcttccgagtaataagagctgtcccatctgtcctcagggatttcggagacacaatctttattttccattaaattgtcccaaaaatcatgctggttttccgctttcggaaacatcccgctcattccgataaccgcaatatcagaactcctgtccgttcccggttcaggcaccttttcagccgcctgtacaggaagcacttcttcttcctgccggcttcccgtatcaggctccgtttctttgaattcaagaacgctttcgggatttcgtttctgcgcacttaaaaactcactcaatttctcaatgttcggatattcaaacagcagcgtttcagaaaggccggtaaattctttatgcaatatggtcatgatttcttcactgatgagagacgtcacgccaagagtaaaaaaagcggttttatcttctgcttcggtcacctcggcacccagcttttccgctattaccgttcttaaaaattcgttaatacatttcatgaggataccatcccttgtacaaaagaatttttctgtgctttaacaagttaatccgccgtctattgccattgtctgtccggtcataaaggacgattcaggagaaagcagaaaacgaacgagtccggtcatatcgtctgtttcgcctaaacgccccatcggcgtccttctgataatctgcgatttttgtttttccggcatatttttcgtcatatcggtgtccacaaaaccgggcgcaagtgaattgacacggattcctttggacccgagctccctggccaggcttcgcgtcaagccgtcaagagccgctttggatgcgctgtagactgaagtgcctttaaatcctcttgaaccgataatggagcttatgttaacgattgatccggaattttgtttcagcatgacccgggaaacgtttcgggtcagcttgatgactgaaccgatattcagattgaggatgcggtcaatgtcttcatcattggtcaggggcagcagctgatcaaggttcaaaccggcgttattgaccaagccgtctattctggaaaacttgcggtacacttgaagaacaaactgtttcatggcggcatcatccgccgcatccgccgcttcccaataaaagcggtcacggtacttttcactctctctcaatgtgttaataaaatcagattcactgcggctgaaagcggctactttgtaattctcatccaaaagcgcctgtacaatcgcttttccgagcccccggctacctccgctgacgaccgctacttttccgttattcatatttgcctcctgttttatacgtttcttatttttttaaatcggtcattagacagtttccgatctgtaacagagatgatctgcggtatctgatatggctgcagcttctgtctgcaatgagctacggcccgctttctgaaagatttgatatcttcctctttttcaagtacggcctctgccgcgacaatctcgcctgtaatcggattttttcggcccgttatgagaacatcccggacattaggtatctccagaaagacgctttccacctctgccggaaacactttctctccgcccacattaatgatttcactctttcttccgagaattcttatatattcgccgtctgtttccacctggtcaccggtgtcgtaccagccgtcttcatcgaaaggtgagggtgcgtttaaatagccgagcatcgccgactcagaacggacccaaagcgtgcctccggtaattttggtctctgttccggcaccgcctactttcatccaagtggattggctgtcttttgatttcgttgagaatatacccagttcagttaatccgtatgtttgtttcagccgtacatccggaaacagccggtgaatgccgcgcagcgttgattggggcatcggttctgtgccgtaagtgatcagctggagtgaagacaggttatagccggcatccgccttggacatcagcagcatgtttaaaaaagtaggggtggcggggagcacttggacagcatatttgtcgaccgcctgataaacggactccggcgttctgctgtctgatgtgacgatcgttcccccgttaaacagaatcgcaaacagcgtattaatgccgcctatatgatccaatttcagaaaaatgagcgtacgcagcggttttctcttcgccgttttgtatttttcaagcagccggccggcgcttaacacggatgctttgcttttgccggaggttcccgatgtgaaaataataatgcctgactcccctttctcgcgcaggtcatcaagcagagggtgagaggcgctttcagaaccttcacgaagcgtccagctgtcattttcatttatttcaatgatttgattcactttcgcgtcttcaaacatatcgagatgcttttcccttgattcattgctgagagggacaacgatatttcggtttaacaaaagcgccatcagcaaaaaaatggcgttcggggaataatccccgataagcgccacacattctccttcacgtattccgttttgttcaagttctttctgaaaaaagctgattcgtgtcagcaaatcatcatacgtaaaagtctgccctttaaaaatgagaaactcactgtcctgcgtttccctaagcttatcagtcacccagctgatatctcccctgctttctgttttcatgattgagcactgtccatgtatttttgataaatatcacaaatgctgccgacggttgtaatgctggaaatcgtttctccttgggaaaaaggatccactccggtttccatctccatctgtgcgactaattgagcgatatccagtgatgagaagcccagatcctctatgactctcacatcatctcccgcttcgacggcccgatatgactgctgttcttgaatatcctgaataatttgagcgatgatctgcttcatttccttggtttgttccatttgctttcagctccattcttcattttataaacttctgatgacccgtttataatccggaatatgatcttgtgaagaggtcggcaccgccagcagcttatccaccttggaaatggccagcaatgtatgattccttttcatatagacttcaatctgatagctgattttcgccactgagatcataccgagggactcaccgtgaaagtcgggatcgcattcttcaatgtgtcccgtcatataaatatcaagctcttcatctgcaaaacaatttccgtaataatacgtctctctttcaagcaaaaataaatgccgcgcgattgaaaccggaaaacccggcttcgaccggcgcgtcatccattcaaattccgccgcatccattatcttgctgaatttcgcaaacaccatggcatgccccggcgcagcatcctgatcaacaggaacccgatatgaaacggggtccgctgttttgaggtttcccggcttcataccgaaagcgtccgttctgactttctttgaccgcatcagcgcgtaaggcggcttggctagcttagaaagttccgcaatacattcagccttcggcgctgagactttgcgcgtcgaaccttctgtttgtgtgacgtcaacgacaattaaactattggctttcatagaaggaaaccgtccccggtcccactcgcttttatcagagctgaccgctcctttcggcccgaacaaataatcagattctaatatggtttctccaaaccgggagatatcgactccgacggaaacctcgtcccataatcggtactgatcaagaggcttatctgaaggaactttgagatgtgtcataaaataagccggatacaaaatcagcccttggtgatcggccatctgatcaggccggaatcccgttccgtccgttaaatggtgactgtgtgcattgccgaataacagcagcagcgcgtactcattcaaattccctaatccgacatggctcatcgttaattcatgattttcaatcagcatggtagtcctccgcagaaaaaatgtaatgtctggtcatactcagcctgtaatcgataccagcctttgcgcaagaaggccggctgtttcttccatgagctgtttgccgatcaagtcgacatgcctgtttctccaattttcaagaggggttcctttcacccattgattaaacgcgccgagcgcagggccgcaatgaatttggtaatctattttactttcgctttttccttccagagcgagcctcgtcgtatgggaaaaataccatttaaataccatcgccattttgtgtttcggattctgttcggctttggcgatctgttcaggagatttatcacgtttcaactgctcatacacttcctcaaaactgcgctggaaatacttatcttcaattaatgttttcgttttttcatctatttcatctaaagaattgtattgtctgtacaagtcaaagagtttattggctcttgccgggaaaaacaggccttttttcagcacctgcacccttgctcccgcttcaaacatatctcccgcgggagcgtatgacgtatcctgcacgttcgcttcctgaagcagatctttcactgaatcacttgtcccggcttcgaccgtgcattgattaatagaaccggttccgataaattcggcgccgagcagaaacgcggcagcagccgcttccggagtgccgatgccgcccgctgcgccgattcttacttttttcgcataaccgtgcttctccatcatgcggtctctgagtctgatcatggcaggcattaatgtatacggaatcccttggtcggtatgccctcctgaatccgcttcaacgcaaatgtcatcagccatcggaatttcttttgcaagcgccgcttccccggctgtcagccgattgtcagacacaagtctttccagcacatgagccggagccggattcagaaaggcctcagcgacttcaggccgggatactttcgcgatgattctgttttggactgacaccgatccgtcatgattcctgcttaatccctttgccctgtatatcacgagagccggggttatgcccataaatgccgatgcttcaataaggtgaatgccgttttttaaatataaatctatcattctgacttccttgtcaggtgacatcatatgatgaagaagattcattccgaatgtttccccttgccgcagtgcagaccggatggttccgatggcctgtccgatccgttcgatactcaatccgcccgttccgaaaaagcccagcattcccgcttttgccgctttaatgaccatctgttccgaagcaattcccctgtacatggagcccgtcatgtaagcatattggatgttataatcttttttaaaatcttcgttccctaatctcattcccgccgttttttgggaatcagctgccgatgctttaacatcagcagtatcagactcttctttcggcataggtaatgggacggcatcttttttaatctgcctcgtcagttttgtcagcacttccccgggcccgacttctgcaatttcattattttcaagtcctatcagacggcgtatcgtgtccgtccactttacctgattggtcatttgcaaagtcagatttgttttgatttcatcattcttataaggtgcggcatgaagatttgagatcaccggaaaacgaagaggcaaaaacgccgtttcttctaaataatccgcgaactctttttcagcatctttcatatagcgggaatggaaggcgccgctcacatttaaaggaagatacattctcacgccggctttttcaaaggcggggcccgctttttgaatgtcttgtttcgttccggcgatcacaatttgcgaaggtgaattgtggttagcgatatcaatgccggtcagatgataatcggatagaacctcttttacttgttcagccgtaaaccccaaaaccgccgccatgcctccgggagctgccttgctcatgagctcccctctttttttcacaagctgcaaaccggtcttaaaatcaaagcagccggccgcaaataacgcattatattctcctaaactgtgccctgcggcgtaatcgggctctctgccggactctttaatcttctttaaataactgagtgcacttaccgtatataacgccggctgggtaaattgcgttttccccagctgatgattcggatcctccaggcacaattcttctatagagtagcctaatatgtcatcagcctgacgtgtcagatcttgaaattcatcaaacagcccggctcccattcctttaaattgagaaccctgccccgggaacacaaacgtaagcatcttatcctcatcctttccccatcgccaattttgtacatcacatgtggttctccatacaaaaacgtctcttatttcatatattgactggtgtaaacaccgccataaaaataaaaacacaaacgcgtttgcgattcagcacaggtttaaaaatcgcaaacgcattgtgttttccttttctaacataatttatattaaaacatcttgcttgtttactgaatgtttcgcatgacaagctgcagtgccaatatgcccgaaaacagccatgacggcacacttctcccttatcatgtatatgtagatatatacactgcaatcatttttataatccctatttcctcttcaacgtgccgaaacagcgattgaaatttaataggtgctttactttaatttaataaatttaacaaatagttgctatttaaagagaataatatcaatttatagataataatgtcaaggctttatttcgttattttctgacatttattccacagttttatattcggtggacagtcggcataattgtttcgggataaatgtcagataattccctgaacccttttcatgtcaaagaaaattcatcgcctctctgtcaattgggtctatacttatttttcattttcatatattatgtaaaaaaaagacgaattagaaaaatttttaatcactttaaatactatccattaaatactttctttgtataataatttcttattattctaaggaggatccagtcatgaaatggtacgcactttttgtagagtcgggaaaagaagaagcagttcaaaaatttctgcgtctgcagtttgatgagcaggctctctactcaatcatacccaagaaaaaagtcacagaacgaaaagccggaattaaatacgaggcactcaaaaagatgtttccgggatatgttctgtttaaaacaaagatgacagagcggacatttcataaaatcaaagaactccccatttcatgcagaatcgtgaataacggagcatattattccaaagagcgcaaaacctatttcacgacaattaaggatgaagaaatcctccctattatcaggctgatcggagaaggagacactgtagattattcaaaagtctatattgaaaattcaaaagtaaccgttgcctcagggcctcttaaaggaatggaaggcattattaaaaaaatcgataaaagaaaaagacgcgccaaaatctgcctgtcttttatggggctggacaaaatggtcaacgtcggaattgaagtgctctccaaaccctagcatttcaaaaaaagcatcaacagcatgtgccgttgatgccctttttatataaacagacgaaagcccgacatcaaaataaccccgctcaccaccgtcacggtcaaatttttgttttcaaggcatagttgacctgaagccgggctgcgcctatgagacaaaatcacatttaggggaatcattttaatcaagagcggtgaattgacggttgagcttcatgacgaaaagcatgtgctgacttcgggcgatgccgcacagttattttcattcctcggaaccgatgacatatttattgctggtctattatcctgaaccggcttaaacgcatatcaggcttcttcaggcagaagcctgatggaccgcaacccattcttgtatgcattgaatcagtttctggacagaaggtgtctgcgtctcctttgcacgagctgtcaaaatgccgagctgcctggagacataccggtcgaaccgtttgatgagcacatcaccatcattcaccaaaagctgcggcaagatgctgatccccagattattccgcaccattgcaataatcgcttcatcccctctgatttgataagcaacccgcggagtgatcttttcttcctttaacactttcagcacatcaaaatgtgtctccggataaggcacgatacatttgacggactccatgacatgtaacggaaccgtttcatattgcgccaattcatgctgcgggctcatcaccgctacaatcgggtcctcggccaacgggtaaaaatgccacttctcgctgtgggatgtcccaatcgccgcatcaatccggtcatctttcagccattgttccagctcagtagaatttccatcaaataaatgcaccttaatagaaggatacagctcattaaattccctcaaaattttcggcagccattttaccgccacgctcgtaacagtgccgagccggacttcccctctttctaacccattaatattatcaacggtttgagacagtttttcatagtttttttgaatttccttcataatatgtaacactttcaagccatttgcggtgggcctcactccatgccgctgtctgatcaaaagcggaaaaccgtactcttcctctaatttactgatcatttggctgatgttcggctgtgtgtaattcaatatggcagcggcttgggtcaggctgccgctttctaccgttttaataaaggctaaatgcttctttaaatccaatcggcttcatctcccagatatcattctttattatccaatgcattagttatatttagtttacttatacatcaatcaaaaataaaatggcaatgtctccatcattatacttgataacaaacagaaggtgagcgtttcagcatgagttttctcattcaattttttatcggcggcaccgttatggtggccgccgcgtatttaagcaagtcgaaatacttatttttatcaggcgttatcacattgctgccgatcatgtcgttactgaatattcacttgcagctgaaaaatatgagccccgacgatttcagagccgctcaaaaaaacggaatattcggtgccttcggcgcagtgatcttcatcagcagtattttcatcctgacaaactggatcaaaggaggccacgcagtcatcggtgcgtttctcatctatatttgctatatgatcggctgtaaatgcctgttatgaagatacggccacgctgtgtataaaaaaatgcccgtccagaacaataagaacgatctgttcagttgtgagcagtttatatgactgaatgatcatgagttgttataatcaatgtcgaaaaacattccgggaggcgaaataaatggcgagaaaattattcacaccatggaccgttaaagatgtaacgatcaaaaaccgtattgttatggcaccgatgtgtatgtattcctcacatgagaaggacggaaaactgcagccttttcatatggcgcactacatatcgcgtgcaatcggacaggtcggcctgattatcgtggaagcgacagccgttaatcctcaggggcgcatttccgatcaggatttgggcatctggagcgatgatcatatcgaaggttttgccaaactgacggaacaagtgaaagcgcaaggatctaaaatcggcattcagcttgcgcacgccggacgtaaagctgagcttgagggagacatttacgctccgtcagccattccgttcgatgagcagtccaaaacaccggctgaaatgacgacagaacaaattaaagaaaccattcaggaattcaaacaggcagcggcgcgcgcgaaagaagccggctttgacatcattgaacttcatgccgcacacggctacttaatgcacgaatttttgtcccctctgtccaatcaccgtacagacgaatacggaggctcacatgaaaatcgctaccgcttcttaggcgagaccattgaagccgtcaaggaagtctgggacggcccgttatttgtccgtatttctgcatcggattatacagacaaagggctggacattgcggatcatatcggttttgcgaagtggatgaaagaacagggagtcgacctcattgattgcagctcaggcgcactcgttcaagctgatattaacgtcttccccggctaccaagtgagcttcgcggagaaaatccgtgaacaggccgaaattgcaacaggcgccgtcggtttgataacgacgggaacaatggccgaagaaattctgcacaacaaccgcgctgaccttatttttgtcgcgagagaacttctccgcgatccgcactttgcaaggagtgcagcgaagcagctgaatactgaaataccgtcaccggtccaatacgacagagcatggtgatgaagtgacagccggagtttttcgatcccggctgtctctttttttatttttcgagaaacgattgccgaagcttctccgtcttccctatagaaccaattagaggagatgactccaatgaaagcagcatggatggaaaggacatatctgattgacgggtgtccgttttatacgaaacaccgtaaaggcgccggcgaagtgacgatcgtctttgaagccggctacggcacttcttctgaaacatggacatcattactcgctgacatagatgaagaatttggggttttcacatatgacagagccggaatcggcaaaagcggacgaagccgaaacaagagaacggcggaccatatggtacaggaattaagcgctcttcttctgaaggccggcgtcaagcctccttaccttgtcgtctcgcattcatacggcacgattatcagcagactttgggcgagccggaaccgccgggatattctcgggatggtgctgcttgatccggtttctgaggatcaggagacgaaagtgcttccgcttcttcctgaagaaatgaaggccgcctatttgaaacagttcaaattggaaggatcacacgcagaatttttaacgagccttaggcagatccagcatcagcagattcatttcggcgatatgccgctgttgattttatcatcgggagagcgggatgagcgcttaaagcacgctcatgaacaatgggtgaaactgcacagaagcatgcttgatgtctcttatcaaagcggatggattcaggccaaaaacagttctcatgccattcatcacgatgaaccgcacatcgtccaccttgccatttatgatgtttggtgcgcggtgcgccagcaaatgaatgctcctgcctatcaggcggtaaactgatgaaaacaaaagccattgtgcaacggcacaatggcttttgttatcgtgatctatttggtctcacgatgcaaagtatactttttcaaccggggtgaatactttttcatttctaaccggtccggattcgtccgtttgttcttcgtcgtgatataatttctgtcccctgtctctgtacaggccaatgtaacattcacacgcatcattttcaccccttttttaaatcgtaattattacgttttattatatatcatcagaaaaaaatgtcaagcgtctattttttaagaccgctccacagtgacctccatgaagtcaaatgcgatcttactgttttcaaataccgctttcgcctcatgttcgagacgctctatcggcgattcaccctgataccttgcgctgatatgagttaagatcagctgtttggcgcctgctttttttgccgtttgcgcagcctgttctgtcgtcgcgtgataataattatgtgcgagctttgcatcttccttggcaaacgtcgcttcatgaacaagcacatccgcattgcgcgcaagctccgttacccgctctgatgccctcgtatccccggaaaaagcgacgattctcccttttttcggggattccagaaaatcccgcccattaatgattctgccatcgtcaagtgtgaccgtttcgccttttttgagtttctgatagacgggtccgggcgggatattcatttctttcaatctgccggcctgcaatgcgccgggaatatccttttcctgaacccggtagccgaacgcttccacaccgtgaatgacggatgctgcggtaacaatgaagtgctcatcttcaaaaaccgtcccctcttcgatttcatgtacggtaagaggatacgtcagatgagtcgccgtcacgttcaggcttgtttcgataaaggctttaatgccttttggcccgtaaatcgtcagctcttcttcaccgccctgaaatgaacggctccccaacagacccggaagaccgtaaacatggtcgccgtgaaggtgggtgatgaaaatcttttctattttcctcggtttgattgttgtatgtaatatctgatgctgagtggcttctccgcaatcaaacagccatacggaacgcctttcttcaagaagcttcagcgcgacggacgttacgtttctcgtctttgccggcatgccggcccccgtccctaaaaataataattccacaatgcttcctcctagatctttgtactactaaggatacaggatcagactgaaaatgtgaattcacccgggccttctccggcctgattaatttttttccgcaaaccgcaaaaaacaggctgaaatgtttgctttcaatgaattttagatttaaaatgaaggaaatatgcggggttttaaaccatgcttcagataaagtgaggtactctaagtgaaaacaaacgacaaaccaaaagcagtaattgtaatatttggtgccacaggggatttggcaaaacgaaaactttacccatccattcaccgtttatataaaaatggtcaaattggtgaagagtttgcagttgtaggtgttggaagaagaccttggtcaaacgaggacctccgggaaacggttaaaacgtctgtttcttctgccgggcaaaaagacatagacgatttcacatctcatttttattaccatccgtttgatgtaacgaatccgggttcctatcaggagctgaatgtcctgcttgatcagcttgaacatacatatgaaatcccgaacaacagaatgttttacttggcgatggctcctgagtttttcggcacgatcgcaaaatcacttaaaaacgaaggtgtcacagcgacaaatggctggtcccgtctcgtcattgaaaaaccgttcggccatgacctgccgagtgcgaaagagcttaacaaagaaatacgcgaagctttcacggaagatcaaatttaccggatcgaccattatttaggcaaacaaatggttcaaaatatcgaagtcatccggtttgcgaatgcgctgtttgagccgctgtggaataaccgctacatctcaaacatccagattacgtcaagcgaggatctcggcgttgaagaccgcgcgagatattatgaaaaatcaggcgcactccgtgatatggtccaaaaccatattttgcaaatggtcgctctcttggcgatggaaccgccgattaaactgaacacggaagaaatccgcagcgaaaaagtgaaggtgctgagagctctccgccctgtcgctccaaacgaagtgagtgactacttcgtccgcggacaataccaagcgggaacgattgacggaaactctgtaccaagctatacagatgagcataatgtagcaccggattccaatacggaaacattcgtgtccggaaagctgttaatcgataacttccgctgggccggcgttccgttttatatccgaacagggaaacggatgaaagaaaaatcaacgaaaatcgtcgttcaatttaaagacattccgatgaacctttattacggcaatgaaacgaatgtaaatccgaacctgcttgtcatccatattcagccggatgaaggcatcacactatatctgaacgctaaaaaattaggcggagccgctcatgctcagccgattaagctggactactgcagcaactgcagtgatgaaatgaacacaccggaagcctatgaaaaattaatccatgactgtctgctcggtgatgcgacaaactttgcccattgggacgaagtggcgctttcctggaatttcgtcgatgcgatttccgaaacgtgggcagccgacaaaaccctttctccgaattatgaagcagggtcaatgggaccgaaagcttcggacgatcttcttgaaaaagacggtctccactggtggaatatataagaaaaaatttaaaaaccgcggcgccgttcatgacggcccgcggtttttaatatcagaaaagcccccgcaatcaatgcgggggcttcttcattacttcatccattcagtatggaaaatgccttctttatctgtgcgttcatacgtatgcgcgccgaagtaatcacgctgcgcttgaatcaagtttgcaggaagcactgccgtacggtagctgtcgtaatacgcaagtgcgcttgagaacgaaggtaccggcacgccttgggctacggcaagtgaaatcacttggcgaagagcgccttggtagctttctgcaatgtttttgaagtagctgtctaacagcaggttgtcaagctccggttcacggtcatatgcgtctttgatcttttgcaggaacgccgcgcggatgatacagccgccgcggaagatcatcgcgatttcaccgtatttcagatcccagttatattcttcagacgcggctttcatttgagcgaagccttgtgcgtaagaacagattttactcatgaagagcgcttttctgaccgcttcaatcagctcttctttattttcagtgaccggcttaacgtctggtccggacagaaggccgcttgctttcacacgctcttctttcattgcggaaatgaaacgcgcaaaaacagattcagtgataatcggaagcggcacgcctaagtcaagagcgctttggcttgtccatttacccgttcctttttggcctgctttatcaaggatgacgtcaactagcggtttgcccgtttcttcatcttttttagtgaaaatatcagccgtgatttcgatcagatagctgtcaagctctcctttgttccactcagcgaatacttcgtgaagctcttcggcagacaatccgagcacctgtttcaaaatgaaatatgactcagagatcagctgcatatcaccgtattcgataccgttgtgcaccattttcacatagtgtcccgctccgtccgggccgatgtatgtcgtacaagcttccccgtccactttagcagaaatggcttctaaaatcggttttacgagttcgtgcgcttccttttggccgcccggcataatagaaggccctttcagcgctccctcttcaccgcctgatacacccgttccgataaagtgaatgccgctttcggcaagctctttgttccggcgctgtgtatctttatagtatgtatttccgccgtcaatcaaaatatcgtctttttccagatgaggaagaagagattgaatcgtcgcatccgttgcagttcccgctttaaccattaataaaattttacggggtgtttcaagagactggacaaactcctcaatgctgtatgtaccgacaacatttttaccttttgcctcttctaaaaactcttccgttttgctgcttgatctgttgtatacagacacagaaaatccccggctttcgatgttaagagccagatttttacccattaccgcaagaccgataactccgatttgttgttttgacatattctaacgtcccttcttcaaacgtttaaccattttaaaatttaaattaaaataaaatgatatttatactaaagaaattatcatacataaccccttttttcaagttattcaccttttcttttcatcctgaaaaaagtctctgttaaagctcgtgccccttgttttgctttcttctttttttataacggcgccttttctgatcaggttttggccgtacttttcattcagctcgttcatcatctgaaaaatcggctcatcctttgcgtcctccttgaatgaaaacagatcaagctgtttatacgcctgctgtttttcaaccagttccgtcccggtgatgccgagaagccttaccgggttttggttccagtgcttgtcaaacagttccatcgccgcttccatgatgtcttttttctgatcagccggattgctgagggtcatgcttcttgtgaccgttttccaatccgcataccgaatcatgatgaacagccggcaggccatgacctccttacgctggagccgttcgctcacagacagcgcaagccggtcaaacacgcccgttaattcatcccagtcagccgaatcatgcgacagggtggatgagttgccgacgcttttaaattcataaatccgctcgggattgacttctgcaggatggatgccgttcgctttatccttcagcctcgggccgtttatgccgagaagcgttttcagcgcatgttcatctccttttgccaaatcaccgatcgttttgatgccgagcgtttttattttttccgcagttttcgttcctataccgtgcatctcttctatcggaagaggccataagacgtccggcagctctctttttcttaaaatggtgatgccgagcggttttttcatgtcagacgccattttagcgagaaatttattcggggcgatgccgatgcttgacgggagcaaaagctctttttgcagtctcgcctgaatgtctgcggctgtctcatacgccctgtgtctgtgcggtgtgtccgtaatatccatgtatccttcatcaatagaaacaggctcgactaaatccgtatactccctcagaatgctgaacatttcttttgacgaactccgatagcggtcaaaattcggaggcacgacgatgagttccggacagaggcgttttgcccgccacaccggcatggtggtctttacgccccgcgctctcgcttcgtagctgcaggtgacgatgattcctttccgttccttcacgtttccggcaacggcgataggttttcctcttaaagacggatcatacgccatttctacggaggcataaaaactgttcatatcgatatgaaatataattctcccttttccggccactcccggcgcctcctttcctttcatagacaaccttatatatatgtagtaaaataagagctgaatggatgtgataaaatgattcttgagtcaatgaatgactttttatttttagtcgattttttcacaattattcttcccgctctgaccgcgatcggcatcgcttttcttttgcgtgagcgccgcgcaggcgagcattggagaacgaaacgaatagatgaacatcaagcagtcgttcagctgaaccgaacagactttcttattattatatatcatcgcattacaacttggatacgtaaagtcatccgcatgaattcaccggcgaatgatgatgaagatgtcagcttcctccttttataacggcaagtgaagatataaaggaggaaacataattgtctaaaacatatcaaaagtggatcgtattgggattattttttatcgtactgtgcacaggccgctcggcttttgcggcgacatctcagactcagacgggaggcctcgggaatatcggttttttccacgattacctgatcgagccgttttcggcacttttaaaaggggtggcgggcctgttccacggtgagtacggactgtcgattattctggtgacgattatcgtccggatcgttgtattgcctttgtttgtgaaccaatttaagaaacagcgggtgttccaggaaaaaatggctgtgatcaaaccgcaggtcgacagcattcaggctaaaatgaaacaaacgaaagatgcggaaaaacaaaaagaactgcaaatggaaatgatgaagctttaccgtgagcacaatctgaatccgatggcaatgggatgtcttccgatgctggtgcaattcccgattttgatcggtttttattacgccatccgctcaacgccggaaattgcttcacactcatttctgtggttcagcttagggcattctgatattcttgtatcactgtgcgcgggggccatgtatttcttacaggcttatatttcccaaaaattaaacgagaaatattcaccggctgctcaaaatccggccgcgatgcagtcagcaaaaatcatggtctttattttccctgtcatgatgaccgttttttcgcttaacgtaccggctgcgctgccgctttactggtttacaagcggactgtttttgacagtgcagaacgtacttttacagcagacgcatcataaaaagaaacaggctgcggctcaggcggagcccgccaaatcataatactgaaaccctgccggaacctatccggcagggttttttcttgtatctgcaaagctttaagcctaatatcatgaagaatgaaaaaagcacccaatcaactgggtgcttcgtttttagttggccgctgtttcgataatggcaacgaccatttctgccgttttgacgagctcttcaatcggcattttttcatttttcgtatggatttgttcatagcctactgacaggttgactgtcggaatgccgtggccggcaatgacgtttgcgtcacttccgccgccgcttgtctgaagttcgctcggacggccgatttttgccgccgcttttttcgcgacttccacaacctgatcgccgtcctgatatttgaaacccggatacatgaccgcgatgtccacttccgcgcggcctcccatctcagctgcagcagattcgaaagcttctttcattttctgcacttgcgcttccattttttcaggcactaatgaacgcgcttcagccagaatatcaacctggtcgcagacgatattggtttgcgtgccgccttcgaaacggccgatattagccgttgtttctttatcaatacggccgagcggcattttagagattgcttttgatgcgattgtaatcgcggagatgcctttttccggttctacacccgcatgagccgttttcccgaaaatggttgctctcactttcgcttgtgtcggcgcggctacaataatgttgccgacttttccgtctgaatcaagcgcaaaaccgtatttcgcggtaatgtctgaacgatccattgcttttgccccgactaatcccgattcttctccggccgtgataatgaattcaatggtgccgtgctcgatgttttgttctttcagcactttaatggcttcaaacattgcggcaaggcccgtcttatcatcagcgccgagaatcgtcgtgccgtcggattttacatagccgtcttccacaatcggcttaacgcctttgcccggaacaaccgtgtccatgtgggatgtaaaataaatcgtatccgcatcttttgtgccctttaacgtacagattaagttgccggctccatgccccgtcacttcttttgtatcatcttcttttacgctcaatcctaaatcagtgaatttttgtttgagcaccttgctgatttccgcttcatgttttgtctctgaatcaatttgaacgagttcaagaaattcttcaagcagacgtttttcgtttaccattttcagttccctccgtttaaagcggtatattaccgtgcttttttttcggtctttcctcttccttatgcgcaagcatgtcaaatgcctgaatcaattttttcctcgagtcttccggccggatgatatcatccaccataccgcaggcagccgctttatacggaccggcgttttccttttcgtatatggcttttttttcgcgcttcgttttctccgggtccccagaagcctgtatgtctctgctgtataaaatcgacgccgcgccttccgctcccatcacggcgatttccgcattgggccaggcgaatacaagatctgctccgagccctttcgaattcatggcgacataagcgcctccgtaagcttttctgatgatgagcgtcactttcggcaccgccgcttcggcaaaagcatacagcaattttgctccgtgacggatgattcccgcatgttcctgctgaaggcccggaagaaatcccggaacatcagcgatcgtcaatagcggaatatgaaacgcgtcgcaaaaacggatgaatctcgacgctttgtcagcggcatcaatcgtgaggctccccgccaagtgtttcggctggtttgcgacaacaccgactgtacgccgtccgagtttcagaaaaccgacagcaatgtttttggcaaaatacggctgaatgtcaaaaaacgttccgtcatccgccagctcttttattacctgtaacacatcgtaaggtttcgaactgtccgcgggaacgagggtgtttaataacggtctggcgtcttcctttttaacgggtagtgccgtctgtccgccgtgcgggagataagaaagcagggttttcacagccgaaagtgcctctttttccgttcgtgcggaatagtgggcatttccgcttatcacattatgtattcccgcaccgcctaaactttccgcgtcaatctgttcacccgtcacctgttcaatgactttcggacctgtaataaacatgtgcgacgtatgttccgccataatcacaaaatccgtcaaagcgggtgaataaacagcaccgccggcacacggcccaagaatgacagaaatttgcggaatcactcccgagtaaaggacgttgcgcctaaagatatgaccgtatccatttaatgataccacaccctcttgaattctcgcaccacctgagtcgttcagcccgatgatcgggtttttgtttttcgccgccagatccattaccgccgcgattttttccgcatgcgtctcgccgagcgtcccgccgagtacggtaaagtcatgggcaaacaaatacacgggccgtccgtcaattgtgccgtatccggtaacaacgccgtctcccggagcattctggcacccgggcgtgcggcttttggcaaacggctgcagctctgaaaaactgtcttcgtccaatagatagtcaattctttctcttgccgtcagcttgccttttttgtgctgttttttatttttttccgctccgccgccgtttgttaaaaaggaacgtctttcgtttaagtgtctgatatgatcactcatgttcatcttgagtttctcctttttcaattgtttcacaaagctcaatcaggacgccgttcgcctcttttggagagagaaatgcgatcttcttcccgcccgctccgttttgcggttcatgatgaagcaaggtcatgcggcatgattcaagctccttgatcgtttccttcatatcggcgcagcggaatgccaaatgatgcagcccttcgcctcttttctgtaaaaaagagctgacgggagacgcgtccgacagcggctcaatcagctcaagctttgtgcctcccgcttctaaaaaagcaactctcacattttggccgtttaccagctcgtctcccatatacgtaagcccgagcatccgttcgtaaaatcctctcgcggcttcaatagagctgacggcaatgccgacatgatcaagttttttcatagcgcggccacctgctttcccccataggatatggcttgttcatataagcaaaacacgttaaaatggtagacagtaatcttaaggagtgaaacaatgtctcaaaaatttatgaaaagcgccgtcatcgtcattttgggcgtatttatactttcaaccctcctctcaggcattatgatgtatttgcagtaaaaaagcaggcgcctcattgcaagggggtttcctgcttttttatgagggctttccgctctattgcaatgtcctcgaatgagcggttttcttttgtaatcaatactttcgttccgggagggataatccggaaaatacggatgacatcccggtttttcatacggatgcagccgtttgatacaaaccccccgatcagctcttctctgtttgttccgtgaatgccgtatattctgccgtcggtgcctttcgcatcaaaaccgatccagcggacgccgagcgggttttccggcgcgcctccctctacatttttcttccggtaatacggattgacggctttgaccgttaccgtaaattctccttcaggcgtcaaatcatccgtttttcccgtcgccacctgataaatgccttctattcggttatcctttacaacagcaagcgcatttgtggctttattgacgataatataagggtcacccggcaaagggttcgcgccaagcggccaaagcggagacagcagcaggacggctgacaataaaaaaaatcgcatgggctcccctccttttttcattagaatgaccaatgaaaggaggactcatgcgattgatccatatgttttttacagcttgatgcctttgaaataacttttaatcacgagatattgttccatctcaccgaggaggtggaacaaagccgcccgcgcttcaaactcctcacgcgttgccgggagcggcatttcttcaaattccgttctcatttctgcaagtctttttaaaaatttatgagcggtattgccgggatgaatggcttcccttaattcatggatgaaatgggcgattatttttccctgctccaccgttattgaaatagaggtaatcttcggcagcagccgttcaatgatttcaaattgtttctgcctcatcttaaaataatgatagtagagattttcatggcgcaaaatatgattctgcacgtcccgataggcgaggtttttcgcctcttgaatcatctgatgcgtctccggtatttccttccctgtccaatcttgctcaccagttaacaaataccgttcgatttcggcgaagatgacggaaaagttgtcctcgatttttttcctgtacgctgcgagttttctgtcgaggctcggcatatacagattcattaacagcgcgacgccgatacctacggtgatcagctggaactcattccagataaacgccatcgtaatgccgccggacatatataaatgaagaatgattactgagctggtgacgatcccttcatttatttttaaaacgactgtagtcggaatgaacagcaccagcaatattccgatcgcaaacggataatagccgatcagtccgaaaaagacatatgaaaagacgatcgccaataaacaggcggcaaatcgggcccacgaggcctgaagcgaccgcttttgtgtaatctggatgcacaatatggtgatgattcctgcggatgcgaagttttgcagatgcaacagctgggctaaataaatggccagcgccgttccaagtgcggtctttagtgtccggtaaccgattttaaacattgcttgctccattctgtttgtttctttctcaaaaaaaagaagaagagcattcttcttcttttcttacagttatattttataatattttttctaaaaagtcctgtgctctttttgacttcggagaaagaaaaaattcttccggctgaccgtcttccacgatcgtcccttcatccataaataatacgcggtctgcgacttctttggcaaatcccatttcgtgcgttacgatcaccattgtcatgcccgtctgcgcgagctctttcatcacctcaagaacttctttgaccatttccgggtcaagagccgaggtcggttcatcaaacagcatgatgtcaggattcatggcaagcgcccgcgcgatggcgacccgctgcttctgtccgcctgacaaacggttcggatagtcgttccgtttgtcaagcagcccgactttttcaaggagagcgcacgccttttcctccgcatcctttttagactctttcttcacgctgaccggcgcgtatgtgatattttcaagcaccgttttatgaggaaacagatgaaaatgctgaaataccatgccgatattttcccgcactttcagtttattcgttttagctgcggtgatttcgttttctttaatggcaatcgttccgccgctcggggtttccagcagatttaagcagcgcagaaacgttgatttgccggaaccggaagggccgatgacggcgacgacttccccttcttcgatctgtgttgaaatgtttttcagtacttcatgtttcccgaatgattttgacaggttgtcgaccttaatcattggctttcagcttcctttctacgccttttccgatgaatgctaagatcaaaacgagcacgtaatagattaagcccgccacaataagaggttctaaatagttgtatgttgcggcgccggactggtaggcccgtctcataatatcgccgagaccgattaccgtgacgattgccgattctttcgtcaaggtgattaattcgttaataatagccggagaaatgtttttaaacgcctgcggcagcagcagatctttcatcatttttccgtacggcacgccgagagcgacggcagcctctttttgtcctttgtcaattgcgttgattcccgctctgataatttcagagacgtaagcggctgaattgagcgataatgcggtgaccgccgcccaaaattgatcgatctgaaagccgagaagctgcggcataccgaaatagatgatcatcagctgcagcacaagcggcgtgccgcggaatatcgaagtataaaaatccgcaatccatttcagcggactgatcgtgctgattttaaataagctgagcacgattcctaatacaagaccgatgaccgctgaaacgagcacaatttttaatgtgaccgcaaggccttccaatataaaaggaatttgggggattgtcgctgagaaatccaaattcatacgtgtgatctcctttgtctttattcaagataaaaagctcaacgaaaagttgagcttccttttatttctcgttggtgaaccattttttcttcagtttttcgatttctccgtttttctccatttctttcagcgctttgttaaacttcgctgtcagatcactgtctttgcggaacgcaatcgcggagcccgattcgtctgatttcgcatctgctgacgcaaagccctgcagatcgttatttgaactgaaatagccttgtgctacgatgtcttcgataatcgcggcatcaaaacgcccggatttaatctcttccgttaagtctgagatccggttgcggtcttcgagctgaaaaccgtatttcgaagcgagcttcttgcctttttcctcttgaatggagccgagctgaacaccgacggttttgcctttcagatcattcagggatttaatgctgcttccctttttcgtaacaatcatattgttagcagtataataaatatcagaaaaatcaacttgctttttccgttccggcgtaggtgtcattccagataaaatcatatctacctgcttggacttcaaggctgtaatcaggctgttgaagtccatgtcctgcacctcaacgtcatagccggtctttttgcccagagcttttgccagatcaacgtcaaacccggtgatctgatcgccgtctttatattcaaatggtttatagtcagccgatgtacccataatcagcttattctttccgccctctgagcctgaattgcctgatccgcaggcggacagcgcaaaggtgatacatgcggcagctaataccaacagccatttcttcatgattcatttcccccatatctactgatctcttaaaattgaatatttattcgttaacttgtattttaaacactttttaattgtgatgcaatactatttttgaaaaatatattttcctttctctgtttattatagtcattgtttttccgattagtgacagctgaacgccggtgtataaatatttatatttatacagattccatataaaaaaccccggaagcgctcggctccggggtttttctttcacttatacttcttcacaatattcttcaaatgcttcctgcagttttgtgacgacggccatcggctcatggccttcaatttcatggcgttccaccattttcatgattttcccgtcttttaaaatggcaaatgacggagaggacggcggatagccttcaaagtattctctcgctttggctgtcgcttctttatcctgtccggcaaataccgtcacaagctgatccgggcgtttatcgtaatgtacagaatggtatgcggcaggccgtgcaataccgcctgcgcatccgcacacagagttgaccatgacgagtgtggttccttttttcgaaagcgcttcgtccacttcctcagcggttttcagctctgtatacccggcggccgtgatttcctggcgggcttgacgcacgacatcattcataaataaattaaaatccatattcaactgggacctctcctttttgatcatcttttcttatgatagcaaggaacctcactatcggcaaatgacaccgctcatatccaaattgttttttgttccttttatgtacctgatgtaagtttatgaccttttaaaaacgggaaacttgttaaagagattgtctgaaataaaggagcagtcgtatgagccaacggaaagcagtattaatttataacggaaacgccggtcaaaaacagattgataaaacgctcggcacggtcgtccccattttggcccagtcagctgacgaacttttgattaaaccgaccaaacatcaggacgatgcccgtcagtattgtgaaaacctcgacagttcagttgaccatttatatattttaggcggagacggcactgtgcatcaatgcatcaacagcatcagcaagcttgataacaggcccgctgtcggcattttgccgggaggaacgtgcaacgatttctcacgggcgctcggcatcccgcaaaaccttcaaaaggccgctgaagcgctcgcggccggacataaacggatgattgacgtctgtaaaacggatgacggctattttctgaacttctggggcatcggattgatcaccgaagcatcgagccatatcaatgaaactgaaaaagcatggcttggtaaaatcagctacttcacgagcgccttgcggacgatgacaagtgcgaacccgtttcctgtcaaattgacaattgacggcgaggtgaaagaagacgaagccgtaatggtgcttgtcatgaacgggcattatatcgggacaaacagagttcccctgcctgatgcgagcctccgggacggcttagccgatgtgttaatctgccgcaacacaagccttgccgcgttgcgggagctgatgacgatggagcagggttcgtttgatgatttcaaaggggagctgtcctatattcaggcctccaggattgaaatcgaaaccggacgtgaaatggacgcggatacagatggcgaggtatacggaacaacgccttgtacgatcgaagtgaaaaaacatcatctcactatgcttgttcccgaggattcacaatgaaaataaaaaaactccttttgccgcccgggcaaaaggagtttttttaatagactgaagtattttcgtcaatgttttctaagatttctttgacgcgtccgaggaaacggccgcatacgagcccgtcgagcactctgtgatctaaagacaggcaaagattaaccatatcacgcactgcgatcatcccgttattcatgacaaccggacgtttgacgatagattctacctgaagaatcgccgcctgcggatggttgataatgcccatagattgaactgacccgaaagatcccgtgttattgacggtaaatgtgccgccctgcatatcttccgcggtaagttttccgtttctcacttttttcgcaaggtccgttatttctctggctatgcctttaatcgttttttcatcagcatgcttaataaccggaacaaacagcgaatcttccgtggcaacggcaatggagatgttgatgtctttcttttggacgattttgtctcccgcccacatgctgttcatctgcgggaactctttgagagcctgcgccgccgcttttacaaagaaagcgaaaaatgttaaattgaagccttctttttgtttaaatgagtcttttatgctgtttctgtacgccgtcatgttcgtgacgtcgacttccatcatcgtccaggcgtgcggaatttctgttttgcttttatgcatattggcggcgatggcttttctgacgcctgtaaccggaatttcaatatcaccggctgacagaactggcgccggcgcttgtttttgctgttgtttcggcgcttgttgcgttgtttgaacggcagccggcgccggtgcttccgacttctgctgcattcccgaatcaatgatcttttgaatgtcttttcgcgtaattcttcctcctgcgcccgttccttcaacttcttcaagctgaatgccgtgttctcccgctaatctgagcacggccggcgaataacgcgctttatttgactggtctttaccttgacggtttgcatcggtgtctgaaggggtattctgctcttcttcccgcttcggcgcctcttcggtttccgtttcttccgtttcaattttgcagatgatctcgccgactgtaagagtctggccttcttctcctacaagttctgtaatcgtaccggtaaaagaagacggcacctccgcattcactttatccgtcatgacctccgcgatggggtcatatttattcacttgatcaccgggggataccagccatttgctgatcgtcccttccgtcacgctctctccgagctgaggcatagccatttgttcaatcgccatgtcaaaaacctccttacgtctttaaaactccgctaattctctcatcgcggcttccgctttgtcaggattcatcatgaagtatttttccattgtcggcgcataaggcattgccggaacatcagggcctgcaagccgcttgatcggcgcgtctaaatcaaataagcagttttcagaaataatggcggcgacctcgctcataataccgccttctttcgtatcttctgtgatcagcaatacttttcccgttttagacgcggcttcaatgatagcctctttatctaacggataaaccgtacgcaagtctaatacgtgcgcggaaattccgtctttttcaagacgctcggcagcctgcagagcgaaatggacgcataatccgtacgtaatgacagtaatgtcgctgccttcgcgttttacatccgcctttccgatcggaaggacgtaatcatcagcagggacttctcctttaatcaggcggtacgccctcttatgttcgaaaaacagcacgggatcttcgtcacggactgcggctttcaacagcccttttgcgtcataaggagttgaaggcatgacaattttaagacccggctggttggcaaaaatggcctccacagattgggaatgatacaacgcgccgtgcacgccgcccccgtaaggcgctctgatgaccatcggacagctccaatcattgtttgaacggtagcgtattttggccgcttctgaaatgatttggttgaccgcaggcagaatgaaatcggcaaactgcatctcggcaatcgggcgcatgccgtacatcgcggcgccgattccgacacccgcaatcgctgattccgcaagcggcgtatccatcacccgctcttctccgaactgttcatagagacccgccgtggctttaaatacgccgccttttctcccgacgtcttccccgaggacaaaaacgcgcggatctctttccatttcttctttcatagctgcattaatactgtcaatataagacattacagacataagtattcctccctacttcgcataaacgtgatcaagcgttgattcaggagatgcgtatggcgctttctccgcttcgtctgtcgcttcgtttacgatagccatgatgtcatccagcatggccttttcttcttcttcacctagaagcccggcttcttgcaagtatgctttgtataaaagaagcggatcctgtttctttgcttcttctacttcttcgcgttctctgtagctgctgtcgtcgtcatcactggaatgcggcgtcaaccggtaggaaaccgtttctattaatgtaggaccttcgcctttagatgcccgttcgcgcgcttctttcacggcccggtaaacttccagcaggtcgtttccgtcaactgtgactcccggcatgccgtagcctgccgcccggtcggaaatattttcgcacgccacctgtttgtcatacggaacggaaatggcatacttattattttcacacatgaaaatgaccggcaatttatacacggcggcaaagtttgccccttcgtgaaaatctccctggttggaagaaccttctccaaaggtaacgaaagagacgatatcctttttatccatgcgtcccgcaagcgcgattccgaccgcgtggggaacctgcgtcgtcacaggggatgagcccgttacgattctgttttccttttgcccgaagtggcccggcatctgccttccgcctgagttcggatcagccgctttcgcaaaacccgacatcatcaaatccttagcagtcataccgaatgcaagcacaacccccatatctctgtagtacggaagcacatagtcggtatcgcggtttagggcataggccgcgcctacttgagccgcttcctgcccttgacatgaaataacgaacggaattttgcccgagcggtttaagagccacattctttcgtcgatttttctggctaacagcatggttctatacatttcaacggcttcttcgtcagaaagccctaatgcttgatggcggtttgtagtcattcaaacccctccttctttccttttaaaaatgaatcgcgtttccgtctgcggctaacgcagcttccccaatcgcttctgaaagcgacggatgcggatgtatggactggccgatttcccaaggcgtcgcgtcgagcaccttggcaagccccgcttcagagatcatatcggtgacgtgcgggccgatcatatgaacaccgagaatatcatctgtattccggtcggcgacgattttgacaaagccatcgctttctccgtatacaagagcctttccgattgccatgaacggaaactttccgatcttaagttcatgtccttttcgggcagcttcttcttctgtcagaccgacactcgccgcttccggatttgaataaatgcatttcggcacaagagcggcatcaagcggagccggattaagacccgccatatgctcaacggcaatgatgccttcacgggaggccacatgcgcaagctgcagaccgccgacgacatcaccgatcgcataaatatgcgattccttcgtctgtccggcttcatttactatgatagaaccgttttccgctgcaatgtccgtgttttcaagaccgatcccttcaatgttcggctggcggccgatggaaacaagcatttgttcggcgtgatacgtttctttttttccattcttttcagcggcaattgaaacgccatccgctttttccaatgtatccggaagcactttcgcacccgttacaatcttaattccttttttcgttaacagtttttccatctcgcttgaaatatcatggtcttcagtcggcaaaatgcggtccgcatattcaatcacagtgatattgacgccgaaatcgttcagcatggatgcccattcaattccgatgacaccgccgccgacgatcaacatggattggggcagacgctcaagctcaagcgcttcatctgatgtcagaatatatgtaccgtctgcttctaaacccggcagcattttcggccttgaaccggttgcgataatcaattgtttcggtatcagcatgtcgttttcttcaccatttgcgtattcgacggaaaccgtaccgggaagaggtgagaagatggaagggccgagcatacgtccgtacccgttgaatacatcaatcttcccctttttcatcaagtgggcgacaccgccggccagccggtcaacgattccctgctttcgtttttgcacgctgtcaaagcggagggagacaccttccgtttcaatgccgaatgctgccgcttcctttgcggttcggtacacttccgcgcttcttaacagcgctttactcgggatacatcctttatgcaggcatgttccgccgagcttttctttttctacaacggccgtttttaagccgagctgggccgctctgatggcggctacataaccgcccgtgccgccgcccagaatgaccacatcatattcagtcgccatttgttttcactccttcgccgatctgatattgctttgactgctcctcgccggctaaaacccgaagcgcgccttgcgcgagagattgcagttcattttctcccgggtacaccagtacatccgaaatccaatctatgtacgatctgatggcggatacgaaacttttcccgtacgccaatccgcccgtcaggacgataatgtctacttttccttttaatacggcgcttgccgccccgatttcttttgctacttgataagccatggcgtcataaatgagcctcgcatgctcatctccggcctgaatgcgtttttccaccttcaccgcgtcagttgtccccaggtagccggagagtccgcccgtgccgacaagttttttcatcatatcggcttttgaatacttgccggaaaaacacatctccaccaaatcacccgcaggaacggttcccgcacgctccgggctgaagggcccttctccgtgaagcccgttgttgacatccgtcacccgtccgcaatcatggaccccgactgtgatgccgccgcccatatgagtgacgatcatcttcatctgttcataccgtttgccgagggacgccgccgcatgacgggcaacagctttttggttcaaagcatgaaaaatgcttttccgcttgatttcaggcattcctgatactttagcgagcggagtcatctcatccaccacgaccggatcgacgatatacgcggggatatttaatccgtctgctatttccctggcaataattccgcccagattagaagcatgctggccgttgtagccgtttttcaaatcagtgatcatggcgtcattcacttcatatgtgccgccctcaatcggtctgagcaggccgcccctggcacaaacggcatcaaactttgaaatgttgatgccctgttcgtgcaaagactcaagaatgcttatttttcgaaattcgtattggtcgataatgccgttaaatgctttcagctcttcttcgggatgccgcagcgtcttttcaaagatacagcgttcattgtgaaagacaccgattttcgttgatgttgagcctggattcagaatgagaatgcgtttttcctgttcgaacattttcatacctccagatcaaattcctatcgtctgcttaatatactttggccgttttgcagaaactggcttcttgaacggcgcatgcgctcaattcgttcctcagccagacggtcggccgctaagtatgtcggaatgccgtcacgcgcggaaatatcgagcacccgctcaatgtttgcatagatgccctcaacctttttcaaagcacgctcagcgttgtagccgtaaagctcatcggccacattgatgacgccgcctgcattgatgacataatccggagcgtacacgattcccatttcatgaatggtatcgccgtgacgtgtttctttcagctggttattggccgcccccgcaatgactttcgccttcagctgtttaatcgtgtcatcgttaatgacggcgccgagagcacacggggcataaatatcgcacgcctgtgagtaaatgtcgccgggatcaacggcgcgggcgccgaagtcctcaacggcacgtttaacagattctttattgatatcggttacgattaaagaagcgccttcttcgtgaaggtggcggcatagattgtaagccacatttcccacgccttgcacggcaattgttttaccttccagtgaatcagtgccaaacgccgctttcgctgcggctttcatccctttgtagacgccgtacgccgtaaccggagacggatttcctgatgaaccgaatgccggagaaattccggttacatagtctgtttcatcatgaatgatgtccatatcttcaacggtggtgccgacgtcttccgccgtaatataccttccgtttaagccttggatgtagcggccgaacgcgcggaacatttcttcatttttatctttgcgcgggtctccgataataacggttttcccgccgcctaagtttaaaccggcagccgcatttttataagtcatgccttttgcgagtctcagtgcatcttcaatcgccgcttcctcactgtcatatgtccacattcttgttccgccgagtgcagggccgagcgtcgtatcatgaatcgcgatgatcgcttttaatccggattgttcatcttggcagaataccaattgttcgtaatcataagtctccatatatttaaaaatttccataggttcgttcctcctactgttcttgtgatgcgcaaatcgcaagcgcaattgaatacagtttattttctgcggtatccgctctgctcgttaatgcaatcggcgcttttgcaccggcgatgacagcagcaacatttgctttcgcaaaataaatcattgacttataaagcatatttccggcctcgattgaaggaaccaagagaatatccgcctggcccgctacgcttccggaaatccctttttgcagcgcagccgcttgggatacggcattatccaaagcaagcggtccgtccgcaatgcagccggtaatctgtcctctattgcacatctggacgatcgcagccgcgttcagcgtcgcctccattttcggattaaccgtttcaatagccgcaaggactgcggctttcggcatagggttccctactgaatgtgcgacatgaaccgcattttgcagaatatgcccgagctcttcaagagacggggcaatgttcagcgctgaatcagtcacatacatcagccggtcatagtccggcacttcaaaaacggctacatgtgataacaccctttttgaacgaagcccttcctggcggtttaaaaccgatttcagaagagttgagctcgggagattccctttcattaaaacgtccgcctcttgttcacgcactgcgcgcactgcttttgccgcagattcttctggtgaatcggcgtggatgatgtcagcattgaacttcggctcatttgccagaagctctttcagctttccgctgtcacccgtcagtaaaaatcgtgccgacaagtgttctgccgccattttgacggcgtggatcacttctttatctgctgcgtgggccactgcaatggtttttgcgttttttgccgcggctttttcaactaggtctctcagcttcattttgtaccacctttcttgtgcgaatccgcttttaacaatgcaagttctgtgccaaatatgcgaaagggtttattccggcttttttcaagaaaacatgcagcggtttgcgctttctctgcaatttattgcatgccgtcatttgcaaggccgtacttgtccattttgtagtacagattccgaatgctgacaccaagcgctttcgccgttttggttcggttgaatttatgcttttcaagcgttttttgaatgatgtgcgcttcaaatttttcaacagcctgagacagcttttccccttctacatccggaaaatcactttgggtgccgtttttgtcattcagctctgattcgaaaacaggcagatgctgctgttcgatccgttccatatgcggctctaaaaatatcattgcccgtccgagaacattttcaagctcccgtacgtttcccggccagctgtaggctgataaagctcgcagcgcgttcggcgtgagcccctttacattgcggccgtaatcctgattgattttttcaatgagccgaatgctcagcgcttcaatatcttctttgcgctgccgaagcggcgggattgagatcggatagcggttaatccggtaatacaggtcttcgcggaacgcgccttccgccatggccttttcgatgttgacgtttgtcgctgcgataattctgacattgacagaaatcgcttttgcgccgccgactctgataatttctttttcctgcagaactctgagcagctttgcctgggtgctttgggtcagctctccgatttcatctaagaaaatgctgccgttattcgcttcctcaaaaagtccttttttgcccccgcgcctcgcgcccgtaaacgcgccttcctcatagccgaaaagctcggattcaagcagggattcagacagggccgcacaattgacccgaatgaatttattgtattttcggtcgctttcattatggatggcgtgggcgaaaagttctttccctgtgccggattctccccgcagcagaatcgtcgccggcgttttcgccccgagcttcgcctgttcaagggcaaccagcatttgttcactcgtgccgataatgtcatcaaacgtgtatttcgcttcaagcgtgcggatgatctggcgcgcccgattcagctcagcagtcagcgttttaatttctgacacgtcgtggatgacgccgacgctgccttttaaaataccatccacaataacgggggcaacatttacgatgacatcctttttattggggccgaccttcatcctcacaccccgcacgggccgccttgtccccaatactttcaggtgcatgctttccccttctgagatatcggtggaagcgggttttccgatgacttcgctttctgacagcccggtcatttttgtatatgctttgttgattaacattccgatgccgttttcatcaacgacggaaatggcctcgtctgacgattgaataatcgcttcaagcatggtgcggatttgttttaagttcgtgacctcttccgccagttcaactgcgtcggtgatgtctttaaacacgcataacgcgccgagaagttttccgccttcatcaatgatcggcagtcttgtcgtgacaatctgcaggtgcttgccgagaagctgcttctggttatattccggctctctcgtttccagaatccgcggcagctttgtgttcggcactacatctttaatttggcggccgatgacatcctcccgttttcggccgaccattttttctgccatctgattaaataaaatgatcgtttcgttgacgtctataaaaatcatgccgtcgtgcgttgaattaaaaatccggtcatgcttatacgtctgcgacttcagcatttggataagctgctgtttttcctccatcagctgaaacaccatgtacgccaattttcccggcatgacgatggtttgttcttttttctcatggagcagctcatccatgaccgctttatcgcctgttgtatggatgataatatctatatcttcagttatgtagggtttccaatctgatgaggttgcaattccatatctccgggcttcttgcagcccttgcgcctccggatcttgatcaaccaccgcaataatccggatcagttttgttttcatcaaaatctgtaggagcgccgtgcctcctttaccagcacctataatcagcaccttctgcatcccgatacccctttatatgaaaaaatttgcacacctgtatttcccgttgcaataatttgcacaacccctatgttaccacgttttgatctcttgacaaaatattttttcgattggacaataaaggaaatcatatcgtaaaggggttttctgaatatgagccggcttgttgcgcttttgattctggtcctccccggcgctgtcgcggcgctcggcattaaactgatgagagatgcattattcgggcatgcgttttccccgtttccgtccctttttcttcagggggcggccggattggcgttttttttgttcggcctttatgttctggccgggtttattttgtacagagatcggaaacgcaatcaagtcagcccgcggttcaggaaaaaaaagctgtaaaaaaagcccttgcaaaaaagggctttttcagtcgtccggcagtatcgttttggcaatggattgatccagttcttcatagtcatcgtaagcgatcgtttcatataattcttttctcgtctgcatatccgaaagcccctctttttgagagccttcttctttcagaaggcggaaaatacgctcaaaagccttggcagccgttctgagtgacgtgaccgggtaaatgaccatctgacagcccatatcggaaaattcatcagcactgtaatacggcgtttgtccgaattcagtcatatttgcgagaatcggcacactgatttgtttggaaaacgctctgaattcactttcgtattggagcgcttccggaaaaacagcgtcagcacccgcttttatataagcggacgccctttttaatgcccctccagcccttcctgctgtctggcgtctgttctcgcaacaacaagaagagtcggcgcggcccgcttgaccgcttggattttttgcgccatttcttcaatcggcacgagctgcttcccattcagatgtccgcattttttcggcaggcgctgatcctccatttggacggcggccgcgcgcgcttcatacatttctttcgccgtccgggcggcattcagcacgcctccgaaacccgtgtcaatatcgacaaggacgggcagatcagacgagcggaccagatctttaacccgttcagccatttccgccgacgtgatgatgcctaaatcgggcagccctctgctcgccgtgtaagccgcgcctgataaataaagagccgaaaaacccgttttcttggcaataagagcggccatcgcatcgtgagcgcctggaatctgcaatagatccggcgctgccatcagcgtacggaaccgctctgcaagctcctcttgagacgactgcttgctgacgatccacgtcatgtttgtcaccctcctattttatatgagaaataagtccataaattcactaacgctgagcttctgcattcggccgctatctttacaggcctcttcgattttccgctgctgcttcaatgaaaaatgagtgctgatgtttgctgaaaacttggcaagaatcttcggaacggcttcttttctgcggaaccggtgcccgagcggatattcacattcaatccgtcccgtagccgtgccgtctgtaaaatgcacctgtacggcatttgagatggatcgcttattcgggtctaagtaatcttttgagtacgctttatgttccgtcacctccattttgctccgcaatgtatcaattcgcgggtcagacgccgtttcctcttcataatgatccgccgtgatatctccgaaaagcagcccgattgccgtaatatactggaggcagtgatcccggtcagccggattgtgaagcggcccttttttatcgataatccggattgccgactcatgggtcataatcgtgatcctgtcaatgtcttcgatgcggtctttcacctccggatgaagccggaccgcgcactccgccgctgtctgggcgtggaattcagccggataggatactttaaacaaaacattctccatcacataggacccaagcgggcgggcaagcttcatttcctgccggttaaataatacgtcttgaaatccccacccggatgcggtcagagccgtcgggtaccccatctcacctttttgcgccataagggccaaatatacgcctctgctcgtcgcgtcgccggccgcccatgatttgcgtgatccggtgttcggcgcatgacgatacgttctgaggcttgaattatcaatccaagcgtgagatacggcgttattgatttcctctcttgagccgcccagcatttgtgcgcaaacagccgcagtcgccaccttcacaaacagcacatggtcaagcccgactctgtttaaactgttttccaaagcgagaattccttgaatttcgtgcgctttgatcattgcgcaaagcacatcacgcacggtaagcggttctttcccttctgaaatccgcactctggatatataatccgcacaagccaatatgcctccgagattgtcagacggatgcccccattcggccgcaagccacgtatcattataatcgagccacctgttgatacagccgatattaaaggcagccgtgaccgggtctaaaacaaaaggcgtgcccgggactctgctgccgttgggcacggaggttcccgggacaatcgggccgagcagctttgtacattcgggatagctgagcgccaaaattccgcagcctatcgtatcaagaagcacatgtcctgccgtagtgaaagcttccgaactgtcaatctcctgatggagcacgtagtcagaaatctcttcgattacggcgtccattcggcggggttctgtcatgttttcatcttcctttctcatctgtttacagacgcgctccggtatagcggacacgcgggcggaaaagccggtttcggctgtgctgttcaatgacgtgggcgcacagcccgaccgtccgtgcgctgaagaatataggcgtatacagcgggatcgggatgccgagcatgtaatagaccggcgctgcgtagtaatctaagttcgggtaaaggccttttttctcccgcatgacgatttctcctgcttcacacatatgataaagacggaaatcacctgaaagatcagacagttttttcaacgcttctttcatcatgagcgccctcgggtccatttttttcatgtagacacggtggccgaagcccatgattttttctttgtttgcgagtttttgagttaataattgtgtaaacccgtctgtatccttcgcttcctcaagcatgtacataactgcttcgttcgctccgccgtgaaggtttcccttaagcgaggcgactgctccggtcagagcgccgtaaatatccgattgcgtcgaagcaatgacacgggccgtaaacgttgagttcggcaattcatgctcactgtataaaagaagcgaccggtcgaatatttcttcttccaaggaggacggcgtttttccggtaatcatatataaaaagtttgcgctgtacgacaaggttccgacaggcgctaaaggctccagtccgttgatgactcgatagctgttgacggtcagattgggcattttgcctatcagcccgcggacacggtgccgatttacagaagaggtgcggttatcaatatccttatcaaagcctccaagcgcggacaaacctgtcctcagtccgtccatcgggtgagtacgttcgggcagcagacggcatatacgcaagatttcctcgggaaggtgtccgccgcgccgaacgtcttcttcaagcgccttcttctctttcgcatcaggaagtctgtcttccaataagagatgaacaatgtccatatagccggccgttttagaaagctcaatcagatcgtggcctttgattaaaatactgccctgctgtgtatccaggaaagaaatccccgtttccaccgcaatgacgccatctaaaccgggagaataagattccatagtttcgctcctttgcgcactttttattgaagaagatacttagaaataatcagcctttgaatctcattggttccttcatagatttgcgtgactttcgcatcccgaaataaacgctccgcgggatactctttcatatagccgtagccgccgtgaatctgcacagcctccaccgccgctttcatcgccgcatcggacgcgaattgcttcgccatagatgcttcttttccgcacggaagccctcgctgatacagatcagccgcatgatagaccaataatttggcagcttccgcattcgttgccatgtcagataatttaaatgaaacggcctgattcgaagcgatgggtctgccgaactggctgcgggttttggcgtactccgccgagcagccgagcgccgcttcgataatcccgagcgcctgagccgctatgccgatccgtccgacgtcaaggtttttcatggcgattgaaaaaccctcgccctcttcgccgagccggttttcaatcggaatttccgcttgatcaaactgcaattcggcagtattggaacctaacaatccgagctttttttctttttttccgacagaaaaaccgggtgtgtttttttcaacaataaacgctgaaattccctttctccctttacccggatcggttacggcaaatgtcagatacagatctgccgctccgccgtttgtaataaagatttttgaaccgttcagaatatatgaaccgccttttcgcacggctgttgttttcaggcttcccgcatcagatccggagtgagtctcagtaagcgcaaaagctccaatatattcgcccgctgccagcttcggaatatacgtttgtttttgggcttctgtcccgaaatgcaaaatcgggattgtccctaccgatgtgtggacggacaaaatgacgccgacggccgcgctgacttttgatatttcatgaatcgctaaaatgtaagatgttgtatcagcacccgccccgccgtaagcttccgggacgggaatgcccatcaatcccgcttcgcccatttttttaatcagccgctccggaaattcatctgttgattccatgagctcaaccatcggtgcgatttccttgcgggcaaaatcacgcaccattttcctcatcatgatgtgctcttcagtaaaatgcatggctgccgtctcccctcatgatctttacgtcatctgccgtactcataaaaaccgcgcccgctttttttgccgagccagccggcgctgacatattttctgagcagagggcatgggcggtatttcggatctccgagccccgcgtagagaacctccataatggaaaggcacgtatccagcccgatgaagtcagctaatgttaaaggacccatcggatgacgcatgccgagcttcatcacctcatcaatcgcttcctttgaagctgctccttcgtaaaggcaataaacggcttcgttaatcatcggcattaatatgcgattagatataaagcccgggaagtcattgacttcgacaggggttttattcatccggacggcaagcttctttactgtttccgccgtttcttccgatgtggcgagtcctctgatgacttcgacaagctccatgaccggaaccggattcataaaatgcatgccgattactttttcaggcctttttgtggccgcggcaagctccgtaataggaagagaagacgtattgcttgccaatacggcatgagggggacagattttatcaagtgtgtcaaacaattccgcttttgcttttttgttttcggcaatggcttcaatgataaaatcagcatctcccgcttctgtgagctccgccggggaaatacggctgaaaacggcatctgtctcctgctgtgacttccgtccttttgcctgctctttctccaggtttgtctttatgcggtgaagaccttttgttaccgtttccggctcccaatcgtataacttgacggcaaacccggcttctgcagccgtctgagcgatgcctgcccccatctgaccggcacctgcgaccatgattgttttcatcttcatccggcgctccctcctttgatcagtacacctccagcaggacggcatctccttgagccgctccgctgcatatagccgctatgcctaaccccctccgcgacgctttaattcgtatattaaactcatgacgattctcgctccgcttgcgccgatcgggtggccgaacgcgattgcccctccgtttacattcactttctcccggctgaacccggctattttttcactcacgagcacgacggacgcaaatgcttcatttacttcaaacaaatcaatatcgtcaacggacagtccggtttttttcaagagccggctgatggcctctcccggcgcgcttgccagctcggacgcttccagtccgacggacgcaaagccaagtatcgctgcgagcggcctgacatgctgctttgctgctttttcctctgacatcagcacaaatgctccggccccgtcatttacaccgggagcgtttccggctgtaaccgttccgtcggctgtgaaaatcggcttgagcgctgcgagctgctcaaggcttgtatcaggacgcagcccctcatccgcttcaacgatatgctgtttgccctttttgccggtccaggtgacggggacaatttcttcacgcaatttgcccgcatcagccgcctcagccgcgcgtttctgactcaaaagagcgtaatgatcctgttcatctcgggaaatgccgtactttttggccgcagtgcttccgtggacagccatatgcacctggtcgaacgcacaggtcagcccgtcatgaaccattaaatcctgaaaaaccccgtcccccatcctcacaccccagcggccggccggaatggcgtacggaatgttgctcatgctttccattccgcctgcaatcagcacgtccgcgtctttcgcccggatcatttgatcacagatggtaacggctctgagccctgatgcacagactttattaatggtttcagccggaacagaccacggaagcccggcatatcttgcagcctgccgtgccggaatttgcccggcacccgcctggacgaccatccccatcaccgctccttccgcttcgctttcactgatagcggcgcgcttgattgcttcttttatggcaatgccgccaagctcggatgccttcacctcttttaatgcgccgccgaattttccgaacggcgttcttgccgcactgacgataaccgtttttcccacaattttgcctcactttcaataagataaaagataacgcttacacaaaacgccctgttacaatatatgaaccggctgaccgagttatgagtgcaccgcctttttcccgcccataaaaaaagaagactgtctgaccagtcttctcagctgcggcattcttcttttatagaaacagccagctttggataatctgtaaaaatcgcgtctatccccgctttcatcagccgcttcatatcctcaggacgattgacggtgaacggacggagcgccgcttggtgttttgcaagatgtgtgatcacttcagcgctgaccgccggcgtgccgagcttcggatgataacccgaagcgggaatggcggcaagataacgttcaggccggtacagcacatccattgtcagcaccgcccgttcaatttcaggcgccagggcgtggcacaccgcgagactctcatgattaaatgaagaaaaaataacgcgcttttccagtccgtaatatctgacttttttgatcacttcttcttccattccttcgtaacggaatacactgtttttcagctcaatgtttatcagaaaatcagcacgttcagcaaaacgcagcacatcggacaaaagcggaattctgacacctttaaaagaatctttccattttccggcggcatcggcggttctgattttgtcatacgccgtatctttcacaaatcctttcaaagatgtcgtgcggtcgagggtttcatcgtgaatgaccacgatccggccgtcttttgtcatctgtacatcaagttcgattccgtcagccccgtcctcaatcgcttttttgaatgcgggcatcgtattttcagggcagtcgcccgacgccccccggtgggcaaaaatattcgtcatatgtgtcacctcagatgtttgtcatcggttttctctattataatcgttatgcacatcaggagggcgctatttacacatattttatcattaccgtccgctgtaataggtttcgattccgtttacaacggcgtccgcggcgtgctcttgtccgttatcgcttttcagcttgtccgcatcttgaggatttgtgataaaacctaattcagccagcacactcggcatctttgaatatgtaataacataaaaaggagcttcttttacgcctctgtccctcatccctaaagacgtgacaagctgctgctgaatgtcggaagcaagcctttcgctgtccgctccttcatatgtcgaattaaaatacgtttccgcgcccgatgccgttgatacggctgaattggtatggaggctgacgaataaatcggattggctggcgctcgctttcgccacccgctcgtccaaacgtaaaaaagtatcatcagtccttgaagctacaggttttgcgccttctgtctccaatttggcgatcaccttgtttgacaccgctaaattgatgtttttctcaagcagtccatttccgccggccccgctgtcttctccgccatgtccggcatctatatagatggttttcccttgcaaaggttcggctgcataagcggacggcgcaagcagaagcagagcggcaccgaaggcagcagcgctttttgtcagtaaacccacgtttttttcctccccgttttcacatatctgtttcttttttcagtttctcaagccgtaattgtccgttgctctcttttttataggtgatttgcaccgccgtatgttcaggcagcgactgacattcaaaccgcttagcgaaaggcaccttcacctcttgcctttctccgtcaatttcgaccgcgatcgtatcgtttccggccgcttttataaatgttccttcctgtgtaaatgacggcgccgcatcagcctccgcggtatactcgcagcctgataacagccatgcggtgaagatcagaagtatggcagacttcacacagatcacctcacgttttctcattcggctttatctttgaacagaatggccgatttgtaaagggagcctccattcctccagcgtttttccatctttggaatgaaggctatctgacctgctgtttacctgaacttagaaagaaaacaagctgatcagtctatgaaaaaggttctgtctgaaggccgaatatgcagaatttaacggaaacggacgactttctgttcattttgaaaaaatatcagatcggcaaaaaagagagccgcgtcatgcactctcccgaatagaaacattcatatttattttgagcttttcataaaatgaacgggacaacttaaaagagcagcgtattggcggcaatgatgagaataatcactccgctcagcaccgtgctgaactgtccgacgtgaaaagaaccgatgcgcaatgaagcggctttttttccaagcgagcagccgatccatatggtcagaaagcttccgaccgccgcagtaatggaaatggcagcgggagaaagcccgatcaaccccgcgcttaatccgttggtcagcgcatttgcggatacggccaccccgagaaccaaggattccaatataccgatttctcccgaaccgtcggcatccgctgcctccggattttgcagcagaccggcaaaacggcctttttttcctgacccgccaacacgcgctgtttttctcggcacagccagcagaatgatgcggataccgatgacagataaaataaacgccgccagcaatacaggaagaaagcccggtaaaacggctgaaatccatttgccgaaataaattccgatataactgaatacaaaacagataaaagcgatcatcatatttgacgcatgcgatattttgatttttctgatgccgtatgacatccccactcctaaattatcaatgcttgaggacactgccaaacctaaaatcaataaccaagccatgttcgtttctctccattctttgatgtcttttcaacatgttgtgccgttgaatctacactatcctattcagcagcacagaaaaggtaccttttctgcaaaaattattgattgacgatcatcattccggcggaaacgaggtgacacccttgacagaaaataaaaataagacactgggaccccttttaaaatcactgcttgataagcactcgctctccatgagaaaactcggcgccttaacaaacattgatacggccactatctcccggattatcaacggcaaacagaaggccaatttaaagcatcttcaggaattttcaaaacacctccgcaccccgctggaggaattgcttgaggcgtcaggcatagacatcggccatgaaaaagaagctgcgccgcaagacccgatgcacgcgattcaggatatgctgaatatggccgagatgtttgatcagcctttttcccgggagcaaattgagcgtgaactgaccagatatgaacaatacgccaaaacccagcagggccatcgcctgatttgcgatgagtttcaaaagaaaatggacaatgaagaaagcgtcggcccttttattgaccatttgaaaaacatgcatcatcagtatatggatgaatcaacaccggctgaagaccgcgcgattctcgggagcgcgctgctgtattatattttagcgaccgacgttatcccggattacatgtttccgatcggctacctggatgacgccatcgccgttcaaatcgctttgaaccggctgaaaaaaaagtaaaggcgcttaaaaaagcgccctttttgtgttgaaaaatatgaaacaccgcattacggttttgtcaaaacagagacagccgtcatatgatacatcaacctaacaaaaaggagggtgtcttctatggacagcaacacagttgtggcagtgtgcgctctgttaagtgttgtgattcagatcggaacgatattcgccgcaggaaagtggaaaaaagaataaacaaattgacggttttttcgcacaagcgtatgcttataaataaccatgtaaaagataagaaagaagatatgcatatgaaaaaaatcattctcctcttcgccgccgctgtcatattcagctcgatcggccatcaaatttcaggaggatataaagatcctgaaaaggaacggagaaaaccgtttcattcgtttaaatggttcagccggtcataacctcaggaagaagaacaagcaaaataattgcacacaatgaaaacataagctagaatacggacgagttaaactcctaaggaagaaggcgaaatgatgaagcaaacttataaaccgctgtttgaaccttttacgttcgaaagcggtgtcactataccaaaccgtatttcagtcgcaccgatgacacactattcatcaaatgatgacggaacgatttccgaccgtgaattaagctacattactccccgttcaaaagaaatgggcatggtcattacggcatgtgcaaacgtaacgccggacggcaaagcgtttccaggccagcccggcatctatgatgattctcacattcccggcttgaaaaaactcgctcaggcgatccagtctcaaggagcgaaagccgttgtgcagattcaccacggaggcttggaatgccctcctgaactcgtgccaaacaacgacgtcgtcagtccgagcggctcagaagaagacggcagacaaacgtcccgtgctctcacagaacaagaaattgagcacatcgtgaaagcattcggcgaagcgacacgcagagcgattgaagccggctttgacggtgttgaaattcacggggcaaacgggtacctgattcaccaattttattcaccgaaaacaaaccggcgcacagaccgctggggcggaagcgatgaaaagcgccttgcgttcccgcttgcagtcgttgacgctgtcaaacaggcgattgatacacacgctgaaaatccattcgttctcggctaccgcctgtcaccggaagagccggaaacaccggggcttacaatgaaagaaacattcatgctcgccgacgcgcttgcggaagagaacttggattatctgcatatttcactgatggatgtcaattccaaagcccgccgcggcgcggatacttcacggacccggatggatttattaaacgaacgcgtcggccataaagtgccgctgatggccgtcggttccatctataccgcggacgaagcgcttgccgtattagaaagcggaattccgctggtggctctgggacgtgtcattttgattaaccccgaatgggcggtgctggtcaaagaaggccgcgaacaggaaatcgaaaaagccattcaggcatctgaaattgataaataccgacttcctgaaccgttatgggaaatgattcagaatacaggcggctgggtgccgtttgaaaagtagactaaaaaactgccggatgtccggcagtttttttgattcacaagtttttaccgctttgtttactcctatttctaacacacagcgtacatatagtaaatagattaatagaaaggagaccgtatatgatggctggtttccctattacgattaacagtctttccggaaacggggttgtcaatgtcggcggtgcgttttcgataagtcctttaaccgtatcaaaaaccgtctacggctcaggagggggaaatacaggtatggtcctgcaaatgaatcaatccagcacatctcaatcttcaaactctcaatactctgatcaaaatgtaacgaaaacattatgatatccgtatttccctccctttccggctggcagcagccggattctttttgccgttttgtttaatcttattccatatcacagcgtacatatagttagtagactgtgagagaaaggagaaaaaatagaatgagcggttgcccgattacgataaacaacgtatcaggaaacggagttgtcaatgttggcggcgccatatccatcagtccgctgactgcatcaaaaaccgttttcggtgccggagggggaaatatcggcattgtcattcaaaacaatgctgtaagccagtccaaaatgtttgaacatcaattttcagatcagaatattgtaaagtcattgtaagggccgccatgctgcccttactgcataaataaagcaggcgcatgctttcccgaaaacttgattttaaacatcagcggtcaccttctcatgttttgaatgatttcagttaaagatgaatagaatgcagattgaaagcatgagtactgaatctcattaaggaaagaaggaatcgtgatgaaaaaactttgccgggaagtttggattgaagttgaccttgatgcgataaaaaagaacgtacgggcgatccgccgccatattccgaatacgtctaaaattatggccgtcgtaaaagcgaacgcttatggccacggctctgtggaagtagcgcggcaggcactggaaagcggggcgagcgagcttgctgtcgccagcgtcgaagagggaattgtgttacggagagcgggaattaaagcgcctattcttgtgctcggcttcacagctctcagctgtgtgaaaaaatctgccgtttggaacatcacattatcagcgtttcaggtcagctggatcaaaaaagcgaatcggatattggaaaaagaagcagagtcgaaacggctgtccattcatatcaatgtggataccggaatgggccggctgggtgtgcgcacagaagaagatcttttagcagtggtgaaagcgctcaagtcgagtacatacctgtcatgggatggcatctttacacatttttcaacagcggatgaaccggacactgagctgacgatgctgcagcacgaaaagtttatcagctttctccgctttttaaaaaatcaagacattacgctgcctaccgtgcatatgtgcaatacagccgccgctatcgcattcccggaattcagcgccgacatgatccgtttaggtattgggttatatggtttatatccgtccgcctcgataaaggaactgaacctcgtggatctcacacccgcactaagtttaaaggcgcgtatcgcttatgtgaaagctatggtgacagatccccggaccgtcagttatggcgccacatatatcgccgaaccgggtgaaatcatcgcgacgattccgatcggctatgctgacggttactcccgcgccctgtccaaccgcgggtttattctgcaccgcggcagacgggtgccggtggcggggagagtgacaatggatatgataatggtcagtttaggtgagaatgagggcaaacaaggagaagaagtcgtcatctacggcaaacaacaaggagccgagatttccgttgatgaaattgccgaaatgctcggtacgatcagctacgaagtcctttctgtgttaagccgccgcatcccccgcttttatttcagagacggcaaaatcattaaaatatcagctccggtattatacgtatagacggcagttcccgtatttatgtatagaacaagtaccggcgtgagtggttcccattgttttcgtcagcaaaatctcaaaacgccttctcttccgcgttcatgcacggaatagaaggcgcaaaaagacatttagccaaaggcttgcgttacgaagctttatgctccaatctcagcttgtcagcaaccatcgcgatgaactctgagttggttggttttgcttttgtcatgcttaccgtatatccgaacagtgaagaaatggaatcaatatttcccctgctccatgcgacttcaatggcgtggcggatggcccgttctacacggcttgcggtcgtgttgaattttttggcgatgtcgggataaaggacttttgtgatgctgccgaggagttcaatatcgttatacaccatggaaatggcttcacgcaaataaagatagcctttgatatgggcaggcacaccgatctcatggataatgcttgtaatgctggcatcgagatttttccgcttcggctccggctggctgcggataatgctgctttgcgcagacggcgcacggtgtgtgacactgctgacatttccgcttacctggcggatatggccgacaaggttttccatatcaaacggcttcaggatgaaataggatgcgcctaaatcgacggcttttttcgtaacgtcttcctgaccgaatgccgtcagcatgatgacgttcggctgcttctcaagctctgattcacgcagacgctccaaaaccgcaagtccgtccagatgcggcatgataatgtctaacacgagcacatcgggattcttatctttaaacaaagaaagacattcctgtccgttataagcaacgccgatcacttccatatcatcctgtccctctatatattcactcaacaggcttacaagctctcgattatcatcagcaacacaaactttaattttctccacgtttcttcctccccaatgtattaacaggacgcaacccatttgactgctatatgttacattcgacaaaaccactacttccccttttaaaaaatccatatttaccaataatagtggtatatctttgtttttctagcattttctaggtttttcgactaaaaattaagtttgacaaatcaggaaacgtgaatttgtcgaaaaatcttcatgtcttattttacatgaatcccggaaagaagtgaagaacgcatcacataaaaaaactgccggatcatccggcagtcagcttgctttgtctttcccgtaaacatcaacacccgcttcagacagcatccattcgatatgaacgccatagccgcttgtcggatcattgacaaatacgtgggttacggctccgacgacctttccgttctggatgatcgggcttccgctcatcccctgaacgattccgccggttcttttcagcagtttcggatctgtcactttcaataccattccctttgtcgccgggaatttttgcggcgtggtgctgacgatttcaatatcaaatttctctactttatcgttttcgataaccgtcagcatttgcgcaggtcctttttttacttcatttgacaaagcaatcggaagcgctttgtcggaaatgttgtttttaatcggctgatgcagtgtcccaaaaatgccgaacgggctgttgcggttaatatcgccgatcgttttccgttctgacgaaaaccttgccagtttttcgcctggattgccgccttttcctttttcaatcgatgttacagtagaacggacgatttctccgtcttctacaacaatcggtttttttgtatccatatcagagatgacgtggcccaatgcgccgtatttttttgttttcggttcaaaaaatgtcatggtgccgatgccggctgccgaatcacggatataaaggccgattcgatatttcccctcggcttcgtcctttgtcggaatcagctttgttttgattttttgcttatcgcgtttcaccaataaatccagagattcaccggttttgcccgctttttgaataaacggggcgatgtcgctcattttttcaattttatgtccgttcattttaataatgatgtcgccagattcaatacccgcttgttctcccggagactttttcccatcctttgtcatcacctggtgaaaaccgacgaccaaaacaccgactgaatgcagttttacaccgatggactgtccgcccggaatgaccttcaattcaggaaggacacgcactttcgtttttttaatgggaaatccggcaagatcatatactacttctgacctgccttgtgtttgccctgttatgtttgcatgaccgtgctcttctttcagcgtaaaggcttctgataattcgcccttttcagcgcttattgatgcattgaccggaacggcctgtgtctggttttcaaagacgctcatttctgacggtatcagtaaatattctttaaacggcttaaaaaagcctacacttagtaaagaaacaaggagaattacacctattgctttcctcatgttatcgtgcattcattccttcactctcctcgctcctatcccacaccactttctttttctgctacatctatacttttgccttcctgcgcttgatttataaccggcatacgaagaaaaacattggatacactgttagagaaatggaacaaaaaataagctgcctgtatcagcagcttatcctgtcgtttttacctgtccggcctgttttaaaagctcttgtgcatgccgttttgtcagatcggtcacttcaacacccgcaatcatgcggccgatttccgctaccttatcctgcttggaaagcggcgtgacatgcgttgtcgtccgtccgtctttgaattcttttgcgatcagaaggtgcgtatccgccatagcggcaacctgcggcaggtgtgtaatgcagagcacctgtgaaccggtcgatactttatggattttttccgcgatggcttgggcaacccgcccgcttacaccggtgtccacttcgtcaaagatgatggaggtgacatcctgctgggaagaaaaaatactcttcatcgccagcatcacccttgaaagctcgcctccggaagcgacctttgacagcggttttaaaggctcaccggtgtttgttgaaattaaaaacttcacaaggtcgatccccttttgggtaagctgcacgggctgcccgttaacaaccggtgcttcactggctgacggatcggttttcacgagaaattccgtatcaaacgttgatttgcccatatacagactttgtaattcctgatgaatcgcttccgccagtttcttggcccatgcttttctgatttttgataaattggcggcttctacggccacatctttgccgaccgactccaattccttcttcagggcttcaaggtggctgtcgcggttctcgatttgatcgatttcctcttctattttagagccgtattccaaaatgtcttctaccgtcgctccgtatttgcgcttcagctgtttgatctcatttaaacgggtttcaataaaattcagccgttccgggtcatattccagatcatctaacagattgcgcatttgaaaggttgcatcctccagcagataataggaacttgacacactttcagacagcttttgcagcggttcattgatatccgaaatatcttcaagctgggcagaggccattccgacccagtcaagcccccctgctcgctgcggagcgcattataggcgttttgcaatgattcataaattttttcaaagttggatatctgcttccgctcttcctgaagaagttcgtcttcattcaattcaagcttcgccgactcgatttcttcaagctgaaattgaatcaggtctaaccgatgcgccatttcctgctcgctttctgacagcttcttcacttttttgagcagctccatataacgctcatagccttcatggtaagcctgaagcgcggattcggcctcagcgcccgcaaatttatccaaaagctccaagtgtttgtcgtcctccattaacagctggttatcatgctgtccgtgaatatctaataaaagtctgccgatttcccttaaagccgcaatcgtcactaattttccgttgacacggcagacgctttttcctccggcattgatgtcccttctcatgacaatcatgtcgtcagatgcgtctattccctgctcacggcatacttcaaaaacgggatgaccgctgtccaatagaaacagtccttcaagctcggcctttgtttcaccgtaacggacaaattcggacgagccgcgtccgccgactaatagggaaacggcgtctataataattgacttgccggcccctgtttctcccgtcaggacggtgagcccccgttcaaacgaaatcgtcagttcctctataatggcaaagttttttattgatagttcagctaacaaacagcattccaccttttatctgataattacgctacagcagctccaaaagacggctttgtacgccttccgtatcttcaggcgtcctgcagatgattaagatcgtgtcatctccgcagatcgtgcccatgatttcttcccattcgagattatccatcagagcgccgattgcctgagcattccccggcatcgtttttaatacgatcatatggcttgctgagtcaatttttacgaacgcatccattaatgaacgcttcagttttgacagcggattgaaccgctgatccgccggcaggctgtatttgtaggagccgttgttcgtcggcacctttacgagatgcagctctttaatgtctctggagacagtcgcctgggttaccttatatccttcttctctcagcatgtcaactaagtcatcctgcgtttcaatctcatggcttgtaataagctctctgatttttatatgcctttggccttttgtcatgtaagcacctctgttttcaagctgttcttgtcattatgttaaccgcttcttgataaaaagtacatgatggcagaaaaaaggaataatagccccctattattccggtacatctgtctttttggcttttaatgtctcatgtgcttcgcggacgatacggagaatatcttcttccggcagttcagcgccgtttccgtcttctccgcccattccagatgaagcagaaactcaatattgccgtctccccctgtaatcggtgagaaggacagtcctttcactgtatatccttcagaagcggcaaattgattcatgcggcggagaacgtcagcatgaacgccgggatctctgacaatgcctttttttccgacggattcccgtccggcttcaaattgcggcttcaccagtgcgatacaatcgctccccggtacaagcagcgtttttaaaaccggcagaatgaggcggagtgagatgaaagaaacatcgattgtcgcaaattccggcaaaccctctgtgaaatcggaaggctcggaatagcggaaattcgtccgttccatgacgacgaccctctcgtcctgtctgagcttccaagcaagctgattatagccgacatccactgcgtaggaccgctcagctccgttttggagggcgcaatccgtgaatccccctgtagacgagccgatgtcaatcatcgttttgccttttaccgagacaggaaacacttccaaggctttttcaagttttaatccgcctctgctgacgtatttaagagggtttccttttaccgttaacggaagatcccgggcgattttttcacccggtttgtccaatcggttttcatttgagtatacgatgcccgccataatggcgcgtttcgctttttcccgcgtttccgcaaggcctttttctacaagaagtacatctaatcgttctttttttgctgtcatgatccaattcctttatgtgtcttcggcggcatcagcagttttatccgattcataacctcagccttcgtgagaccgatttcttcaagcagggcggttacgctgccgtgttcaataaaccggtctgggatgcccattctgtcaatcggtgtatgatacatgccgaggtcatgagcgtattcaagaatcgtgctgccgaatccgccttcaagcacagcttcttctatcgttaaaatcggcagaccttcattaagaatggccttcatcatttgtttatcaatcggctttatgaacctcgcattcacgacacgcacggacaggccttctttttgcagttcttcagccgcttccagcgccatttcaatggtcgtaccgaatgttaaaatgaccgcgtcttttccgggacggagcacttcccatgttccgatcggaatggttttcagctctttatccatcttaacgccgagcccgtttccgcgcgggaagcgcatcgcaatcggaccttcctcgtatgaaagggctgtattgaccatatggcggccttcattttcatccttcggcatcattaaaacgaggttcggtatatgccgcaaaaaggcgatgtcaaagacgccttgatgcgtctccccgtcagcgccgaccaaaccggcgcggtcaatgccgataaatacattcgcgttttgacggcagatatcatggacgacctgatcgtacgcccgctgtaaaaaggtcgaataaatcgcaagaaacggcttcataccctgaagcgccattcccgcggccattgtcgccgcatgctgttctgcgattccgacgtcaaacatgcgctcaggaaattctttcgcaaatccttcaagcttagagccgaccggcatagccggtgtaatcgcgacaattctgtcatcctcgcgcgccagctcctgcacggtgccgctgacaagtccgctccatgaaggcgccgcggctttcggcttgacgaaatcacccgtattgattttataaggccccgttccgtgccatgtgccgattgtgtcggtctcagccggtttatagcctttgccctttttcgtaatgacatgcaaaaggacaggacctttcgtttttttggcgtattgcaggttttcaaacagttcgtggtaggaatgaccgtcaacagggcctaaatacgtaaagcccagctcttcaaaaaacatgcctgacacaagcatatattttaagctgtcttttatccgttccgctgtggcggccaattttccgccgacggccgggatgcgcttaaataaatattcaagctcgtcttttacccattgatatttgccggccgtgcgaagccgtcccagcatagaatgaattgccccgacattcggcgcaatgctcatctcattatcattcaggatgacgatcatatcttttttctcatcaccgatatggttcagcgcttcgagcgccattcctccggttaaagcgccgtctccgataatcgggatgatatattctttcgatcctttaatatcacgggcggctgccattcccatcgcgcctgagagcgatgttgagctgtggcctgtttcccatacgtcatgttcgctttcgctgcgcttcgggaaaccgcaaagccctttatattggcgcaaggtttcaaactccttgccgcgcccggttaacagtttatgaacataggactgatgtccgacatcccataaaaatttatctttcggactgtcaaattctttgtgaagcgcaattgtcagctcgacaaccccgaggttcggcccgatatggccgccagaggcagacagcgatgtgatgaggaaattgcggatttcctcactcagctcttccagctgttcaattgacatctttttaagaaatgacgggtcctgtattgataaaagatccaaagcggatcaactcactttcagcatgaatttctgcaaattaaacagtgtctttttgaaaaaagaaaaagactccctttgtattttcatcgaaactgcttacattttaccataggagcggcagccccttcaaatcaggaccgtttttaatgatctctcgccgcgattaaatcacagaggtcatgcagcagttctttctgaagagaaaggccgctgatgatccgtttcgcctcgctgatatgatacgccagcttctctttcgcgccttcaagcgttaaaagcgacggatacgttgacttttcattcgacgtgtctgagccgaccggtttgccgatcttctcctcatgcccttcaatatcaaggatgtcatctctgatttgaaatccgatgccgatatggctgctgaacagacgcagcttttcgacttcatcctccggcgcatctgccaaaatggcgcccgccgtcacagaaaaaccgaggagcttggccgttttccgctcgtggatggattccagctcctcaagcgttatccgcttttgttccgcttccatgtcggcagcctgcccgccgaccattccttccgttcctgccgcgctgatcagctcatcgacgagacggagccgtttttctgctgaaaccgcctcagacacgtgggatgtgatcaatttaaagctttctgtcagaagcccgtctccggccaatacggctgccgcttctccgaagactttatggtttgtgggctttccccggcgcagatcatcatcgtccatgcaaggaagatcatcatggattaaggaatacgtatgaatcatttcgacagcgcatccgaccggaatcccgtctttttcatcttttccgtaagcattcagaacggctaagacgacgagggggcgcagcctctttccgcccgcttccaaagaatacagcatagattttttgaggatttcaggcatcgcaagccgttccgtatacaaagaaagctgctgttcaatcagttttttgcgcgatgctaaaaatgcgtccagtttatttgtcaccttcgtcttcctcctgaacgctgaaaggtgcaagttcgccgttatcttttaaaataaagtccatttgcttttcgacatgctgaagcttttcatggcacatttttgaaagggccatcccttcctgaaaataattaatcgcctgctcaagcggcacgtctccttcttcaagctttgccacaatgccttcaaggcctttcatcgcctcttcaaatgtcagctcttcactttttttggtttctgtcattttcgttcgcctctcttttgcaatacttcacacgtcagaacgccgtctgtcatctttacttcaagcgtatcattttgttccacttgatcaacgcttttgatcagctctttatctttataggccagactgtatcctctctccatcacctgaaggggacttaatgcattcagtttaccaagaaccgtctgaaactgcgaatgaagctgcttcagctggacattcatgcttcgggcgagctgatttgagcgctcctcgtaccgttttttcgcctgtttcagctgggtttcagggtggagcgccgttaatctgtacgtattccgctccagctgcctttgtttcctgtccgtaagccctgtgagctgtgattggaactgctgatacaaaagatcaaactgctgttccttttgggtatacaatcgtttcggaaaacggaacgcgtaggatgactggagcgatagaacccgttcttttttcttgctgatatgctgctgcatcgctcttgtcagccggacttccgccgtttttgtccgttccattaagtccgtcgtatgggggacggcaatttctgccgctcctgtcggcgttgccgcccggatatccgcgacgaaatcactgattgtaaaatccgtttcatgtccgacggctgatataatcggaatggcggaagcaaaaatcgcccgggctacgctttcttcgttaaatgcccacaattcttcgatcgagccccctccccttccgacgatcaggacgtcacacattttttgtgcattggcttcttcaatgcgcttcacaatcgatctgctggcattttcaccttgaaccagcgcgggaagcacaatgactttcacaagggggtatcttcttttgagtgtggtaatgacgtctctgacggctgctcccgtcggtgacgtgacgaccccgatcgtagccggaaaagcggggatggcctgcttatgccggtcatcaaacaacccttcgccggcaagttttttctttaattcttcatatgctaagtagagcgcccccacaccgtccggctgcatttctttcgcgtacagctgatagcttccgctcggttcatagacggaaatgccgcctcttacgatgaccttcattccgtcctcgggcttaaacgcaagcctcgaactttgtctttgaaacatgacggcctgcatgcgggcatgctcatcttttaatgtaaaatagatgtggcctctcgtatgaattttaacattggagagctcacccttaatccaaatgtcttcaagatgagggtccacatcgaattttcgtttaatgtatttggtcagcgcggaaaccgtgacatatgccgcttcactcacatcctgcactcctttcataaaggctttttgccctaaactaagaaaacccgctctggctgaaaggagccttaagaagcgggtatcgtgctcattgtcacactttttgtgactgtctccggttatctatgataacgtacgtctggcagatttaacagtattatgcgcaagcattgtgatggtcatcggacctactccgcccggcaccggcgtaatgaaagatgctttttctttcgcttcatcaaactgaacgtctccgcagagttttccgctttcgagacggttgacgccgacatcaatgacaatggcgccctctttgatttgatcggctttgatgaaattcgctttaccgaccgctaccacaagaatatctgcttttttcgtatgctcagacatatttttcgtacgggaatggcaatatgtgacggtcgcgttttcgttcagcagcagctggccgaccggtttaccgacaatattgcttcgtccgactacaacaacttctttgccggaaagatctacgttcgtctttttcaataactcgacaattccgtgcggcgtgcatggtagaaatgtatcttcgccaagcagcattttcccgacgttgagagggtggaaaccgtcaacatccttatcgggagagatccgctcgattacggctttttcagaaatatgatccggaagcggcagctggacgagaatgccgtggaattccggattttgattatactgatcaatcactgttaaaagctccgcctcggttaagcttgagtcaaagcggtcaagtttaaatttcattcccattgtttcagcggcttttttcttgcctgtcacatatgaaacagaagcgggatcgtctccgattaaaatgaccgccaaaccgggcactacgccttgtgctttcagctcttctacttcttttgccaattgttcgcgtttttctttagccgtttcttttccgtcgatgattgttgcagtcattttctttcctcctatgattcgatatcagttttaatgttagaaagaaccccgtttacgaattttgcagctttatcgtcgccgaaccgttttgccagctcgattgcttcgtttaatgacacgttagcaggaatgtcgtcagtataaaccatttcatacaccgccagacgcaggatcgcgcggtctacgtttgcaatccggtcaagcttccaattgacgagatggccggaaatcatttcatcaagctgaacctgatgttcgatcactccgtacaccagctgttcaaagaaggcatctgttttttcaccatcaagcgcgtgctcaatggcctcgttcggtgcaatatcgctgacatcaatctgaaaaagtgcctgcaaagctttttctctagctgttcttcttttcattttctttctccttcagatccgctttatccgcttgtcgttaagcttaaagagatcataacatatttttttctcaatcgcatgtcgaaatttaggttttttcaccctaatgccgaatattttcacaaaccgtattaatttcattcggatttcacagcatgaagaaactcggctgccgtttgtaagccggctttcttcatgcctgaaatgacgggaaacgtataaaaaaccaaagggctgcccatccccttggtttttatacgctcattacatttcttcgtcgatttcgacttcttgggctttcgtgtcaaattgaatgccgacgatatgaatattgatttcattaatggtcagagacgtcatgtttaataaggtttggcggatattctcctgaacgcttgccgccactttcgggatcgagatcccgaattgaacgacgcaatagacgtcgatggtaatcccgtcatcggctaaatcgacctttacgcctttaccgtgattgattttgccgaagcgttctacgacgccggtggcgaaattgccgcgcatttcagcaactccttcaacttcggaagcggcgatgccggcaatgacttcaatgacctcaggagcaatttcaaccttgcctaaatgagcctcgtcatgatccattttaagcacactgttgtcttccattcaattcacctcccgcaaaaattatgagcccattacatcatatgtttctaaaaactttgtattaaactctccgctgacaaatgtttcgtgttcaagcagtttcagatggaacggaatcgtcgtttcaataccttcaatcacgaattcgctcagcgcgcgtttcatccgtgcgactgcctcatcacgcgttgttccgtatgtgatgactttagcaatcatactgtcatagtacggcgggatcgaatagccgggatatgcggctgaatccacgcgtacgccgagtccgcccggcggcaggtacatgttaattttaccgggtgaaggcatgaagtttttcgcaggattttcagcattgatgcggcattcaatcgcccagccgttaaattcaacgtcttcctgtctgagcgaaagctcctgtccggatgccactttgatctgttctttgatcagatccgttcccgtcaccatttctgtgacagggtgctctacttgaatacgcgtgttcatttccatgaagtagtagcgctgttctctgtagtcataaatgaattctactgtgccggctcccgtgtaaccgacggccttcgctgcttttaccgcagcttcgcccatctgctccctgatttcagaatcaagcgcaggtgacggtgactcttcaagaagtttttgcagacgtctttggatagaacagtcacgctctccgagatggatcgtgtttccgtaattatccgcaagcacctgaatttcaacatggcggaaatcttctatgtacttctcgatgtacacacccggatttccgaatgccgtagcggcttcctgctgggtaatctcaatgcctttgatcagttcttcttctgtgcgtgcgacccggatgccttttccgcctccgcccgcagtggcttttataatcacaggatacccaatttcacctgcaagcgaaaccgcttcttcggtattttttatgattccttttgaaccgggcacaatcggcacaccagccagctgcatcgtgtcgcgcgcgatatcttttgttcccatttttgaaatggcgtcagccgtagggccgacaaacgttacgttcaattcctcgcacagctcggcaaagtcggcgttttcagctaaaaacccgtatcccggatgaatcgcatccgtgccggtcagctttgcgacgctgacgatgttcgttacatttaaatagctttcttttgatgttttcggcccgatacaaaaagcctcatcggccatttggacatgcagggcgtctttatctgcctcagaataaacggctacagtttcaatgcccagctctttgcaggcccggatgattctgacggcgatttctcctcggttggcgatcaatagctttttaatcataatagcaggtctccttactcagcttttacaagaaatagaggttgtccgtattcgaccagctggccgttttcaactaacacttcaacgatttctccttttacttcggcttcaatctcgttaaagagtttcattgcttctacgatacaaacaactgtattttcgctcacttttgaaccttggtttacgtaagggccggcttccggcgatgaagaagcataaaacgttccgaccatcggagacgtaattttgtgcaggttttcgtcttgtttcggcgcttcctgaacaggagcggcttcatgcgcttccggttttgcagcctgcggagcaggtgcgtaagcggcgggaacggcttgagcttgtcccgttacattcactgccggcgcttcattttttttcagtttgaggcttacgccttcgatttcgtaaacgaattcgtcgatggaagattcatcgattctttttatcagttcatgaatttcgttgatttttaacatcagtttccactcctatgtataaaaaatagaaatttatgggttgctactaaaagtacatactatgtttatcttacaggagcgcttgtgtaaattcaacactgatctaaaatgacatcagaaaagcccgcagcgggtgcgggcggtggagatctcttattttgtcggttcaaacgtgacggcgacgtctttcatcgtcttgatttctttttccaccaggtcaatgatagcggaagcttttgcgtttgaatgtttgtcagacatgaccgtaatgttgattttgtctccttcagcatccacgagcgcatctttgtagccttgtgttttaatcagcgtttccagctgtttttccgtcccttcagcattgctcagcgccgtcattttatcgtaggcttcgcttttttcctttgcggtcgcatcatcgcttgaaacaatgctgtttaactgttccctttctttgcttcttgcgtcttcaagttccatgcggtatgcggtaaataagttttcatcagctgtttctgtagcgaccgatccgtctttgtccgatgcttcggctgatgtttctttatcctcttttgcgcctttagaatctttcgttccttttgttccgtcttctttatccgtgccgcttccgttcttatctttcgtttcaggagccggcgttttttcagttgccacttctccgctgcttttttcgcttttcatctgcacggcatttttgctttccggcgacataatataataaacacttaataccacgacgagactgagcattgttaaaagccaaaccgtttgttttttcagcatgatttatgaatcctccttgatttttttaggggcaaccgctacacggtagctcggaacatcaagcacccttgtgacggcatcaatgatggttttttttatttgaacgttgtccactccctgagcgacaacgagtacaccgcggatatcgggctttttcgtctggacgacgaccggggtttcctgatccccgtttcgaatcatgacaatttgttcttcagaggtttgatcggttacgcttcttttgccgccttctttatcggtttcttcggtggtggtgtcttttttcgttttatttttctcaaacactttcaaagatgttgcgtctacgttcacgacaattgatacatcctccacgccgataatcgtttcaaggatttctttcagctggttttcatagtctctttcataatcatcgatcgtgtttttggcgctgctgtctttcgatgccttaaaaacgggtgcgcttttttgcccgcttttgtcttccgttcggccggacatgacggtctgcgccgcttggtccttcccggttttctccggtgaagagaacagctggctcaccagcataaaagatactccgagcacaaacacgaacagaaagtaatgatattttgtcagttttggtttttctccgtctttcgcctgtccgatcatcagctgttttttgagtatggtccatagtccgtttttattcatggccgtttttctccccgccttccatataaaccgtaattttctcactgccgatttcccatatatccgcaagtttttctttgatgtctgcggcctcttttttttcggctgcgccttccggttcgtatttgcggtctgtgcggatgtcgatcggtgcgacggtttgcacggttttttcagaagatggggccatatacacgctgatcgtttttacatcttcttctgaacgaacctgttcttccgctgtaaggcggatgtcgtctattttgtattcgtcatgactgaacatctcctccgctttcttttttagttggacagccatttcttctaaaacatatgcgcggtttgatgcttgtatttcttttttttctgatttgatttgattttttatatcagcggattgagattgctcttgttttgtcaaataatcgaagatgatttccgggtctgttttgaaaagtttgaagatcgggttgagcatgacaatgattaacagcaggctgacaaccatcttggcgtatttttgcatactggagctgggcagcagcatgtcgatgacgatggcgaataagataaacaaaataatgcttgtcagccattctgttaaaaagctcatatccaatgggcctcctttatttcatcatcatggtgaggttgcctgctgtaataatgactgtaatactgaggaaaaacatgagagagacgatggcgagcgccgcgaaaatatacagcacgcttcggctgatgacgccgaggcacgtaatgacgggcccgcctccgagcggctgcagaatagcggccgcgagcttataaataaaagcgagcgagagcactttgatcgccggaaacgcggagatgcagatcaaaattccgactcctaggattcccacggtgttttttaataggagcgatgcgctgatgaccgtatccgtcgcatccgtaaacatccggccgagcacgggaataaaattgcctgtgataaattttgcagtcctgagcgtaatcccgtccgtcacggcagccgaagccccctgtacggagatgacgccgagaaacacggtgagaaatacggcaagcgcgccgatcgcgatatttctgagcagattggcaagctgcgtgactttatattgatccgtcatcgtgctgacgatgcttaaaatcgctgacaggaaaataagcggcatgacaatgttttgaatgagaaggccgctcgtattcatcagaaataaaataacggggtgaaaaaaagctgcggagacggctcccccggaagacgccaaaagcgcgagtaaaagcgggatgagcgcgagaatgaaacttgtcatcgtctggatcgcttcactggcataattgacggcaacatgaaagctgtttaaagcgagaataatcagcaccatgtagacgattgcataagccactttgctgacagtgctctgctgaaacgcattttgcaaaagctgcagaatgacacaaaaaatggtgagaagaatcaaagttcccagaagctttccgtttgcgagcacttcatgaaacaagtatgaaaataaagccttcagccatgcctccggcgagaacgttttttcaccgttaataaagtcgatgatgcttcccttttggctttcaggcagaagaccgccgtattctgtcatgatgtcgtcccaaaactttccgatgccttctgttttcagcgcttcggcctgctttttcgccacttcatcagcggattcttggtgaactgcggtttcctgcgacgcaccgtctgttccggcagcttgtacacattcagtctgaaaaaataagaggatgaacaaaaaagcccccgcccaccgaaagcgcttcattttttgtgcccccctttccattttattgatgatcaagaaggaataagtccgagaatcgtttcaataatgacggtgagtatcggcacggccattaccagtatcaaaatttttccggccagctctattttcgaagcaatcgctccctggcccgcatcctttgtcagctgcgcaccgaattcagcgatgtaggcgatgccgataatttttaaaatggtttccacatagaccatattgacatttgcattgacggctattttttctatcattctgataatgtcgtaaatctgatcgatgagatagagaaagatcacgcagccgctgaagacgacaatcataaacgcgaaagtcggtttctgttcttttacgatcagggagagaaatgtggcgatcaggcctaaacctacaatttgaacaatctcaatctgtaagcccccctatccttggaatagaaacacagctttgatctttttgaacaggtcatcgacaatcgtcgccaccataaataaaatatagataaagccaagcagcgtcacccattgggcgtattctttttttcccatttggtcaagtatggtgtgcagaaacgcaaccacgataccgactccggcgatttgaaaaatgacatttacgtcgactcccattttatgtttgctcccctcatgtttacatcaatagaagaatgagtaacagtccggctaaaaatcctaagcttttcaccattttttcatttttcgcctgcgcccgtccggcatccgcttccgccgcttccaaatgtgtaagcgcaagcttgatatgtttctgctgagaaacacggtcatggagcccgagcgtctctccgaattgcttcagcacatcgtattcgctttttttcatcgccatggagggccagttatgtttcaagctctgttcccaggccgttttggcggaatcgcttccctgctcaagcctcctgctgaaagcttgaaacaatgacgatacaggcttggaaagctgtgcggcgatttgtcccgaagctatgtgcagcggcgtatgcccgaacatgatttccgcttcaagcgattgcagcgccgcgcgcagctgacggatctgtctcggcctttcaatatacattttggcgatctcaaatcccgtccatgtcgtcgctgtcagaatgaacacggcacccaaaagcttcagcatgtcatcacgctttcagcatgcggaacaggtttcccgtcctttccgtacatcctgctgatcgttcccggaccgcggcgtcttgacagttcaacataccggtcaaacacgttttcctcccaaagcattttcagcgacggcctcttgaccaagtctttcatattccatccgtgcgcagagacgataacggatacgcccgcatggagcgcctccagcagcgcttgtgagtcttccattctcccgatttcatccacaattatgacatcaggactcatagaacggatcatcatcatcagcccttccgccttcggacaggcatcaaggacatcgactctgcggccgaaactgtgctggggaatgccccgcaggcagccggcaatttccgaccgttcatctacgatacctgtcttttttgccggaatgcgttttgatccggtgctggaaagccgggccaaatcacgaagcaaggtcgttttccccgtttgcggaggaccgatgatcagcgtgttcagccagttttctttccataagaaaggaatgagcggttctgcgatccccagcttctcccgggcgattcggatattaaaagaagtaatatcccggagtcctttgacggctccgttttcgacgatgactcttccggccagccccacacggtggcctcctctgattgtgatgtatccttttttcagctcttcttccagcgtgtacatactatagttgctgagccggctgaggatcagctgtgcgtcgccggccgtacacacatatgacaaatacaaaggttgtcctttttggatcagttcaaccggcctgtcgacccggattctgatttcttctgtatcccgcctcgcttcttcgggcacggcggagatggcatctctcaataattcagggagaacctctgtaatttcattcaatagagtcccctcctttttaccgattggcttctttaaaatgtatgatccgggacagactttatgacaccccggccctctatttatgcacaccggccaaaatcagcaccacacccgcaaaaatcaatattaattttgcatatgagagctgtccggcaatctgataaatgccgatcgtcattgtgatgataaagatcagagggccgacgattgccaaaatactattcaccacaaccgcttttctgatgtcgtttgtcaaaagcatgataatagcggcagataattcaatgagcgaggacaaaactcgtaaaccggccatcgttaaaacagtagaattgattgaaccgaacaaaaatttcattgcaatcccccaacttcaagcattttgttacactatatgctctagctcacggaagtagtctcactattttcatatagaagaaagattctgaggcagaacgcaaaaaaaagcctgccccgtaaaaggagcagactccgaatttctttaactacgctcttgacacgtaagaaccgtctgatgtatttacaaccagcgtatcgccttcgttcacgaagaacggtacgtttacgacaaggcctgtttccgttttggcaggtttcgtgccgcctgacgccgtgtcgcctttaattcccggctctgtttcaacaactttcagttcaactgtgttcggcagttcaataccgagcgtttcagactgatacatcatgatatgcacagacatattttccagaaggtatttcaattcttcttcgatttggttttcgttcaattcaagctgttcatatgagcttgtatccatgaacacgtgctgatcgccgttggcataaagatactgcatcgtttttgtttcgatttgagctttcgcgactttttcacctgcacggaatgttttctcctgaatagcgcccgtgcgcaggttacgcaatttagaacggacaaatgccgctccttttcccggttttacgtgctgaaagtcaacgacgcgccaaatgccgccgtctacttcaatcgttagtcctgtacgaaaatcgttaactgaaatcatgtttgatgtcctcctatactccgatcacaaaataattaattctttaggggaatgcgtaattgtccggttgccgtcctcagtgatgatgatatcatcttcgattcttgcgcccccgacttccggtatgtatatgcccggctcaaccgttaccgccatgcccggctcaagaacggccgatgacctgaaagacagccccggtgattcatggacttccattccgaacccgtgtcctgtcgaatggccgaaatactgtccgtagccttttgcggtgatatgatccctcgtcagggcatccgcttcttttcccgtcatgccgggtttaatatgcaggacaccaagcgcttgggcatcgtatacgacctgataaatctctttcagtttatcacttggctctccgaccgcgacggtgcgtgtgatatcagaacaatagcctttataataagcgccgaaatcgagcgtgaccaagtctcccttttcaatcaatttgccgcttgccactccgtggggaaggctggatctgactcccgaggcgacgatcatatcaaaggaagagccgtctgctccttgacgtctcatataaaattcaagctcgtttgcaactgaaatctctgagatgcccggtttgataaacgtcagaatatgttcaaacgcatcatccgcaatcttcgcagcttcctctaatatcttaatctcttcacttgacttaatcaagcgcaacttttcaacggaatccgcgacgggaaccatctccgcttcctgcagcaccgcttggtaggatgcatatgttccgtacgtcatgctgttttgctcgaagccgagttttttaatgccgtactcaagaatcgtatccgcagccgtttggattaagcttccgccgtgctcgataatgtcaaaacccttcacttgcgtcttcgcctgctcggtgtaacggaaatccgtgataaatgccgcacgttctttcgatatgaccgcaaggcctgacgaacccgtaaatcccgtcatgtactgcagattggcggagcttgtcaccaacattccgtctatatccagctgaccgaaaagatttcgcaatttctcaagtttcattccctttctcctcctcgccgattcttgactgccgcctgacaacgcgggagcatccctgcccggttttcagcataaaaaatgttcacttctcgtgaacattttaccataccggacagggattatacacttattcacttgttgccgagcgcccttgcaagcttgtctgacgtaagttcattgtagttgaaggaaattgagtagccgacaaacaaaccgtacagaatgtaaaggcaaagcgtcgtcacgattgtatctgatttcaattcagtgacggatttcacatcttcgaaaatcggattgaataagaaaaaaaccgcacaccataaaatgacgccgtacaccatccccggccacatggttttaaaacgcttcaggcagacgaaataaataaacgccccggcaattgaaatgaatccgatgacaacgatgctgaccatcgtgcccagccattgttttttccattctccgatcataaacggctgaagaatcatgttggggctgatctctgaaaaatgaaagacatacccgagatagccgatcaaactccaaaatacaccgccggcaaatccgataccgcaaattctgccggtaaatgaaacaggctgctgatcatcatcctgcttctttttttcttcctgttctgaatgtttttcgcttgtcatcatggcacctccagtcatagactgcccaaaaattgaaaagtcataaaaagctgcgccatattttcattcaatgagtaaaatctaaagaaacggggtatactgcatgtagaaaaagcattgattttccggctgtctaactagaggtttaccgcggtttcctgtacaatagagtgaaaggaaatggttagtaaatcctaagaaaacaggcaggttgataaacaatgtccaaacaaaaaacgccccctgcatacggcgggcaggctgtcgttgaaggggtaatgttcggcggcagaaaaaattatgttaccgccatccgcaggaatgacggaagcattgattttttcaagcttccgagagtgccgaacgccaagctttcggctttaaaaaagattccttttttgcggggaattgtcgccatcattgaggcgagcgccaacggcacaaagcatttaaacttttccagcgaacgttacgggcttgatcctcaggatgacgccaagctggagcaggaagagaagaagggttccggcttatcgatgtttttcagcctggcggtgatcggcgttctgtcgtttttgttcagcaaattcgtttttacgctcgtcccggtcttcttagcggagcttgtaaggcccgtattttcctcagacgccgcgcagatcggaatcgaaagtctgtttaagctgattctgcttctcggctacatttattttttatcaatgacgccgttaattaaaagagtgtttcaatatcatggagccgaacataaggtcataaactgttatgaacagaatttgccaattacaatagaaaatgttcagaaacagtcacggcttcattaccgttgcggttcaagctttattttatttacgatcattgtcggcatgttcgtctatttactcgttccgacagatccgctttgggtgcggattttagacaggattgcgcttataccggtcgttctcggcatctcctttgaagtgctccagctgacgaacagagtacggaatatccccgttttgaaagtgctcggttatcccggcctgtggctgcagcttttaacgacaaaggaaccggcggatgaccaggtcgaggttgccat

SEQ ID NO: 4 - DNA, 1090715 bp, Bacillus amyloliquefaciens
agaaagctttaacgagcttctcagactggaagacatttcagaacagagcgaaaatccgtctcacaacgtaatctgaaccgttaccgttattattttggaggtgggcagttatgaatcatcgtgtacaacctttttttgctgtattgatagcgcttggcgcattcggtttcatttatgcggcggtaaccaaccccgggcagatgatttcaagagcaatcaccgttattatcgcaggcattattatttattttatcgtgaggacggtcctgaaccgacgcaccggccgtgacggaaccgctttcaaaaaagcggccagacaatcgcggctccgaatgaaggagcaaaaagcgaagcaccgcgccggacacagaggccgggtcagccatttgcggagcgtgccgagcagcagcagaccgaagccgatgattcttaagaaaaaaagccagacccagcttaccgtcatagaaggcaaaaagaataaaaagaaaaacagagcgcttttttaatagctccattgcttcaaaaattgctctgttctgctttttcctagctcaatgagagctagttttttttgcggtgtgagatgaaactccgtcgccatcacatgttccaccggaataaaaataatattctgttcgtactttgtcgcgatatgcctggcatcatgagcgtctttcatcgtttcaaacaaagccccgaacagctcaaaagcgttgcggattgattttttcgggcgctctttttcgttgggcgaaagcgaaattccgatgaccggccgtttgcgttcttttgaatacagccaaatcgggaaattgcttaacacgccgccgtcaacgaccgttgaggtgcctttttcggtcttcagttttatcggttcaaaaaaataaggaatgctgcagctcattctgacggctctggcaaccgggaacatctccggatttaatccgtagcggggaagatcgtcaggaagcacgatcatcgttccgttcgtcagatctgaagcgatgagacggagcgagccttttttcaaatcgccgaacgcgatgatgcccttcgcttttaatttatccgcaatccacttttccagcatatcgcctctgtatagtccgaggcgccaatatatcgacacccactgcaggattttcagcgggaggaatgagtatctctgatcaagcaattgccttccgtccacctcatctatgatggaatgaacctctctgctcgtatagcccgcagcgataaatgcggcaataatcgcgccggcgcttgttccggcgagcctttcaaagcgaaagcccttttcttccagcgcttcataagcgccggcaagcgccaccccttttatccccccgcccgaaaatacgccgtcaatctgcatagcgcgccctctcccttccatctcaaggtgtattattattttaagaaacggctgggcgaaatagaccaaagaatgaagacattaaaaaaagggcgccccatttcgggctgccctttattcaccgggattttcggtttttttctgtacggatttcaattcttttttccggctttcgtcatcttcaaaatactgaacgaggtcgccgatgcggtcaatgctgttccagctcagatgatgttcgattccttcaacatcattgtaaatcttctcttcatcaacaccaatgattcttaaaaactgctcaagcaattcgtgtctgtatacgagccgtttgccgatctttttgccttttgacgtcaatacgagcccgcgatatttttcataaatcaaatactcgtctttatctagtttttgaaccattttcgttacagaggaggggtggactgccaaagcttccgcgatatcagaaacccgtgcatatcctttttcttctatcagcatataaatctgttcaatataatcttccatacttggtgttgtcataagtaaccctcccaaaaagcaccttaactttataaaccattacaagtttacactaacggtcatgaaaaaacaaggatgcttccggtctgtcaagccttatcagcgcttataattccattcatcagacgcgtatttcgtctcagccagctcattgacaaatgcaagctcttcagacgtgagtgtgtaaggctcaagatgaatgttcagcccttcctcaaaaccggctttaaaagcgattctggcctcatccatcgttacccgtttcggcgttaaggcgttgatggctaccgctttgtttttgaaattccgctgcatgcgctcacggactctgtcgctcggatataaaaacagatcaaacagcttatcctcatcaatgtcaagcaggatggaaccgtgctgaagaatgacgcctttttggcgtgtctgtgcgcttccggcaactttccgtccttcgacgaccagctcataccacgaaggggcatcaaagcagacggacgagcgcggatttttcaagctttctttttctttctccgttcgcggaatcgcaaagcaggcatcaagtccaaggtttctgaatccctgcagaataccttctgaaatcacccggtacgcctctgtcaccgtggccggcatttccgggtgatcctctgaaacgattacgctgtatgtcaattctttatcatgcagaacaccccgtccgcctgtcggtcttctgacaaacccgaggccgtgtttatgtactgcgtcaaagttaatttccttcttaatattttgaaaatacccgacagacaaagttgccggattccagccgtaaaaacggatcaccggaggaatttttttttggctgtgccaatataaaagcgcttcatccagcgccatgttaaatgccgggctttcattccctgagtcaataaaccgccatgtttctttttccatacactgaacccttctttatcgttttaataaaaccagtttaacaaactgccttgaaaatgaaaaatatttcgtttcattaaggatgacaatcgcttcatgctttactataatagtatttgtcccaaaacgtccggtaagccttgttttcaggaagcagggttttgattttataagctaaaggagtagaattgcattgtctaatatgattgctttaattattgttgcggcgtttatcgtttatatgatcgtttcgtacttttaccagcagcgtttaatgaaaacacttacggaagaggaattccgcgcgggctacagaaaagcgcagctgattgacgtccgtgaaccgaatgaatttgaaggcggtcatattctcggcgcgcgcaacattccgctgtcacagctgaaacagcgcaaaagtgaaatccgtcctgataaacccgtttatctgtactgccaaaacaatgtccgcagcggacgcgcggcacagacgctccgcaaacacggctgcaaagatatttacaacctgaaaggcggatttaaaaaatggggcggaaaaattaaagcaaaaaactaatcatgaaaaaagagctgtccgttttatacggaagctctttttttataccgtgtcagcggctgacgtcaggtgtacgttcgtattttaaaaccggctttctagccgccttggtttcatccattcttttgacaactgttgtatgcggcgcctcctgaacgatttcaggcgattcctccgcttcccgcgcaatttgaatcatggcatctataaacgcatcaagcgtttccttcgattccgtttccgtcggttcgatcatgatgctttcttcaacattgagaggaaaatacacagtcggcggatgatagccgaaatccaaaagccgtttggcaatatcaagcgttcttacgccgagctttttctgccttcttcccgataacacaaattcatgcttgcaatgacggtcaaacgggagatcataataaggcgcgagtcttctcatcatataatttgcatttaaaaccgcgttttcggtcacagcttttaagccgtcaggccccatggaacggatatacgtgtaggctctgacattaatgccgaagttgccgtaataaggttttacgcgcccgatcgactgcggccggtcatagtcaaaagtcaaacggccctcttttttcgtgagaacgggtttcggcagatacggaatgaattcttttttcactccgactggccctgagcccggtcctcccccgccgtgcggcccggtaaatgttttatgcagattaaggtgaacgacgtcaaatcccatatctcccggtcttgctttacttaaaacggcatttaaattcgctccgtcataataaagctttccgccggcctgatggacgatttcagccatttccgtaatgttttcttcaaataacccgagggtgttcggattcgtcagcatcagcgccgctgtttcttcgtttaccgctcttttcaaatcttcaatgtcaaccagcccgtgctcatttgacttaacggtaatcgtttcaaaaccggcgaccgtggcggatgccggattcgtaccgtgggctgaatcagggacaatcaccttcgtccgtccgaagtctccccgcgcttcgtggtaggcgcggatcatcatcaggccggtccattcgccgtgagcgcccgccgcaggctgtagcgtcacctcgtccatgcccgtaatctcctccaagtgtccgcttaaatcgtataaaagctcaagcgccccctgaaccgtgtcctcgtcctgaagcggatgaatagcggagaaacctgcgaaccgggcaattttttcatttaatttcggattgtatttcatcgtacaggagccgagcggataaaagcctgaatcaactccgtggtttctcttagaaagagcggtataatgccgcataatatcaagctctgatacttccggcagctttgcgtcttcatcgcggatatagtcaccgggaagaaggctttcaagctctgtttccggcacatcaagctccggaaggctgtaaccgacacgcccttcgcgggacatttcaaaaataagcgcctgatcttgattattcatgttgatcccccaatcccgcaataagcgaatcgatctcttctttcgttctcagctctgtgacggcaatcagcatatgctgatccagttccggatacgcaagacctaagtcatatccgccgatgatgccgtcttgcaggagccgccggtttgcttccttgacgggaagattcagcctgacggcaaattcattaaatatcgggccgtcaaatgctacgtgcaagccggctttttccgcttggcgtctcgcgtaatcagctttcaatatattttggcgggccatgtctttgacgccgttttttccgagcgccgtcatcgcgactgaagccgctaaagcattcagcgcctgatttgaacaaatgttagacgtggctttgtctcttctgatatgctgctcgcgcgcctgaagggtgagaacaaaacctcttcgcccgttttcatcctctgtttggccgacaagccggcccggcacctttctcatcagttttttcgttactgcaaaatagccgcagtgcgggccgccgaacgccgcaggtatgccgaaaggctgcgcgtctccgacgacaatatcagctccgtatgccccgggcggtgtcaaaataccgagcgcgagcgggtttgaagaaacaatcagctggctgtttcctttatgtgcgagcggctcaatgtcctttaacggctcgatttgtccgaagaagttcggatactgaacgatcacggcggccgtctcatcacaaacggcatgttccaatgcttcaagatctgtgacgccgtttttcgcgggcacctctacaacctcaatatattggccctttgcgtatgttttcaaaacatcccgtgattccggatgaacggctgcggaaataatgatttttttctttttcgtatgtcccgacgcaagcatcgccgcttccgcaagcgccgttcccccgtcgtacatagaggagtttgcgatatccattcccgttaattcacagatcatcgtttgaaattcaaaaatcgcctgcagctccccttgtgaaatttcaggctgataaggcgtatatgccgtgtaaaactctgatcgggatatcacatgatcgacgatgaccggctggtagtgatcgtacactcctgcgcccagaaaagacgcatatgtaacagcgtccttatttttcgccgcaagctttgtcagctctctcgtcagctccgtttcagattttgcttttttaatttggtagtctttttgaaacctcacatcttccggaatatcggcaaacagttcatcaattgtttctgcgccgatggctttcagcatttcttttttatcctgttctgtcgcgggcaaatatcgatgcttcatatgactctcctttttcagctctgttttggacgtttataaaacggtgtgcggactatcttcgcttttaccgtttttttacggatttccacttctacttccgttccgacttcactgaattccgttttgattaaggcaaggccgatatttttctttaaagtcggagattgcgtgcctgtcgtgacttccccgatcggaacaccgtcttttttcacggcgtacccgtgtctcggaatccctttttcaatcatctcaagtccgaccagctttcgcggggctcctttttctttctgttcacgcaatacagatttcccgaaaaaatcggaatctttcttgtgtttcacggcaaatccgattccggcttcaatcggtgtaatatctttcgtcaattcctgaccgtataaagcaagcttcgcttcaaatctcagcgtatcacgggcgccgaggccgcacggaacgaggccttcatgctctcccgctgcaagtatctccttaaatagatgaaccgcatcttcattgcggcaatataactcaaacccgtcttcaccggtatagcctgttcttgaaagcaggacttggcgtccggcaacgtccgcctcgtcaataaatgcaaacggctttaaggaggacagatcacattcagtcagcttcgcaagaaccgactgagcattcggcccctgaacggcaagcagtgaaatcccgtcagactgattcgtcagcgtgacatctccttccgcatgttctgtcagccaggcgatgtctttttcaatattagacgcgtttatcacgagcagatagcagctctcgcttttctgatagatcagcaaatcatcgaccgtaccgccgtcaggatagcacatggcggtataaagcgcgtttcccggctttaaatcggcaacgtcatttgtcatcattttttgcagaaaagacagggcgtctttaccggatacttcaacttcccccatatgagacacatcaaacaggcccgcttttgtgcggacggcttcatgctcctctttaatagaagaaaattgaaccggcagctcccatcctccaaaatcaatcgtttttccgccgtattctttatacacatcataaagcggtgttcgtttcagcatcatcttcccccttcagtcattggcgcttgtaaaaacatataaaaaaggacagagaaacacctcatgaaaatgaaggtttctctgtcccggcacctgaaagtttactttatgaacatatcataaagacgtcccctttggtggcctgcttcttctaagtgcagacactctccagagttgcgtcgagcaagagttcttttgcctgagagattcactccgcagtttgctccttcggcgcccggacgcccatctttcgtccgagtctctccccttgctgtcattcgctcatatttaccaattttatggacatactaaagcaatatcttttagtgaaatcattacttatatcctaccaccctcatttacgtccggcaacaaaaattatgataaatcagttttttaaaagaaaggcggttttgttacatatgacagcagagatcatatttgatgcaaactggccgggagagttttctgagcggctgaaaacggacggtccctggtcaaattgggagctgtacaaactgtcggctgaagtccagcagacccttgccattcctgaatttgaagggttgagagctcctttatacctgcccgatttcactccgcttccccatcagcttgaggtcgcgcagaaagtcgttgaaaaaatgaacggcaaggcgattttggctgatgaagtggggctcggaaaaacggtggaagcgggcctgattttaaaagaatatatgattcgcgggctggccaaaaaaatcctgattcttgtgccggcatcactcgtttcccagtgggtgaaagagcttcaggagaagtttttaatacccgctgttgaacagaagaaaagctatgtgtgggaacagtgcgatatcgtcgtttcttctattgatacggccaaacgctcccctcacaaagacattgtcctttctattccgtatgatctcgtcattattgacgaggcgcacaagctcaaaaacagcaaaacgaaaaattatgaatttgcgagaagtcttgtgaagaaatactgcctgcttctgacggcgacgccgattcaaaaccggatcgaagaaatcttcaatttagtgtcactgttaaagcccggccatttaggaaatgaaagcggatttcaagaaaccttcaatcagaaggacgggattgacgctcatgagcatttgaaagaactcgtcaataaggtgatgatccgcaacacgcggagcgacaccggccttacatggacgaagcgccacgtggaaacagtgccgatcaccttttcaccgacggaacaggcgctttacgatgacattgccgcactgaaaaacggcacggaaaagcccgcaagcgcattttccattatgacgctgcaaagagagtgctgttcaagcagggaagccgtgtatatgacgctcaaaaaaatgcttgaccaaaaagacaaacaagcgcccgcattcgatgaacagacgatcgctaatttaatggaccgcatcaatcaagtcacgcaaaactcaaaagcgattcaagttgttgacttgatccaaaagattaatgataaagtcattatttttactgaatacagggcgacacagatttacctgcaatggttccttcagcagaacggcataagctccgttccgttcagaggcggatttaaacgcggaaaaaaagactggatgaaggatcttttccgcggcaaagtgcaggtgctgatcgctacagaagccggaggcgaagggatcaacctgcaattctgcaaccatattatcaattatgacctcccgtggaacccgatgcggcttgaacaaagaatcggaaggattcacagactcggtcaggaaagagatgtccatatctacaatatggcgacaaaacatacggtggaagagcatatcttaaaacttctgtatgacaaaattcatttatttgaaaatgtcgtcggagaattagatgacattttaacaaaaatcaaagtgagcaattttgaagaccatttgcatgatattttatgccattcgctgacagaggaggaaatgagaatcaaaatggacaatctcacctcttttctgtcgtacggtacggaaaagcccgccagaaaaaaaggctcttaaaaaggaggaagcgcgacatgagacagcaggaggttcaccaatttttactgcgcttttttgaagcgaaccactgcccgattacagaacacgggccgggttttatgacggttcagttgacggtcgagatggacaaacaaattatgaaccgcccgttttattggcattggcgtgaaaaaacgggcggcgaaccgaacccgatgaagattacgttcatcactgataaagaaacggctccggaggatatggacggcgagtttatttactttggagccccgcgcctctttcaaatctttcaagcagttaaacaaaatgggagatttacaagaatatatgagaaaattgtatcagccggagccagagtgccgcttcagccctggcttggattaaatgtagtgatttcataccaatccgacatgaaaaaagacagacttttgtctttaggcctgcatcttgtttctggaacaattatagaagggtttcagcagaagcttgcaccgcttccgctgacctcgcaaatatcagactattgctttaccatatcgccgatgattaagccggaaagcgggattaaaaggatggagcattacttaaaagacgctgccgccaaagagccgtcagactgggctgacagcgcgatcgccagatggaaaaaggacctcaggctgctcgatcagttttatgagcagacagaagaaaaacctgaggaataccatttggaaaaacaagcgctgaaagccttatatcagccgaaaattcacattcagattgaaaacggcggtttatttttcctgcaaagtaatttttctggataagcgttatccattcgacacctttcccgttttttctggaaattctatattataataaaagtatatagaaaaaatttctggcgtttcgcatgcgatgaatcacttccagacatgtaaagataaggtcatgggcggattggctgaaatacataaacaagtattttaggaggagaaaatgcatgaaaaatgcaaaaatggaattttcgcaattagataaggaatgggttgagctgatattagaagcccaaaaagcaaatatcagcctagaagaaatacgcaaatacctgctttcgcataaaaagtcttctcaacatatccaggcagccagaagtcataccgtaaatcctttctgaatgtgctataatatcacaaggaaggtgatgacattgattggccagcgtattaaacaataccgaaaagaaaaaggctactcactatcagaactagctgaaaaagctggggtagcgaagtcttatttaagctcaatagaacgaaatttacagacgaacccctccattcaatttctcgaaaaagtctccgctgttctggacgtctcggttcatactttacttgatgaaaaacatgaaaccgaatacgatggtcaattagatagtgaatgggagaaattagttcgcgatgcgatgacatccggggtatcaaaaaaacaatttcgtgaatttttagattatcaaaaatggagaaaagcgcaaaaagaggagtagtgccgccatatgtgcacaactcctcttttaactgtccgactttcggattagtttttatcctcactgtgagccttttcattttctttgacgtaaccgtctttatccgtatgatctttcttaatggtcaagccgttccattgcgtggcttcaaaagagaattgaagagaaatcgcattgccttggaacttgttttgcacacttaatccgtccgcagtttttgcggtgtcatttttaaattggatttccattctcacctggtcataatcagcaggcgttttcggaactccgtcgtactcaggagctgttttgccgttaatggttgccacattgacttttccgctctcgctcaggaatttcggatcaatgtgcttgctgatcgcttcggcagctgctttatcctgctttgttgacattaagtataagtctttcaggctggccgcctttaaaatgatatttttaggatagccgttgcccccttctttaccgactgtcagaaccgtaatttcaaactggctgaggaaatcctccgcagattcattgcctttctttgctcctttaaagtcagtaaaattcaaagccatcagcacttctttaatggcaagtgaaccgttgtttctgaattcaaaatctttcgtcaatttatcacctggttttaagtttgacaaattgacattggctgattgttctttagccgataaatcaagtgttcctgacgcaaatgtagcgtccgtcgacttcacatcattaaatgcggcccatgtgcctcctcctactaatgctaaaccgagtgcggcagaggcaacgcccaagcttaatttctttttcatacccatgtttgtactccccttactttttattttttgttatcaaatcctgtcgccaggttgcaaccgtattcatgtggagatggttctctttttcgcatgttcttccagcgctttcgttttccgctcaatatcgcggagggcgctgacgatgactgttattgagtaaatcaaaagcatgacgccgggaacgattaacagaatcgccgttccgatcggctggcttgccaaatgtatgacatatcccgcatacggaagctgatatcccgtatactgggccgccactttttcagcttgaacgggggcggcatccggggcggcattatggtccccttttgtctcaaacagcaggttcccgtccttttttgtgatcccgattattctgtgtgtgacggctgttccgtcatcttgcgtaaaggtgatcacatcccctttttttaagtcatttacgtcagaaattttctttaccgctatgagcgaacccgtcttaaattccgggtccattgaacccgacagcacggatttcagcgtatagccgaagatggccggctcacccccggaagcccgggtcgaaatcaccgttaacgtcagcacaataatcaggctgaagatgacggcatacaaaatattactgatcagtttcagcgtttttttcatgttcttccccgctttcttttaccggctcagccggctctttctccgttttcttcagatcggaaacggttgcctgttcccggcatttgacgagtttcatcggttttgaccactcaaattgttcttcgtccgccggatacccttcaggcttgtaaatcttgaatgcgtatatgcccggctgcaaagaccgctttgactcaattttataaatcgttttgctttttttatcagtaataagccctttatccacaacattgccgtttcgtaaaggctgctgctgagaagtgattttatggagctcccatttccagtcagaaacagtccgctcttttcccttattctccagctcggcatagagttgaagcggcgcacacacggtgcctgacgtatcagtttgatttgttatatgtaaatcactctgatcccagcgttcgtcataacggcaatcgtcatccgtatattgaaaatctccgcacgtttgaaccgggagactgaagcttttcacatcattgaaggaggaacttgtatcacctgtgaactgagcacatatcgtcacggacaggcaaaaaatgaacgaaagccgtaaaaatagcatcatccgccatctcaccttgccctttttttccattcgcaacaatcggaacatgccttaccccctgtaaaactgttaataaatatgacaaccgttctctttaaagaacttcatgaacaaagtataatcaaggattatcgtcttgaaaaatgtcaaaatcggtcaatttgttcgtttttgagaatggtatctttcaaaaacatcgttttgcttcaaattacacacctttttggaattttttctaataaaacgtgagaaaataacgaggtgcctagcacaaaatggaaagtatatacagcgaaaggacgaagaatgatgatcacacaaagtctgatttgcctttctcttcttgttttcggggtttcaggaacagctcaggcggaaacggtgccttattatgctgttcaccataaatcaaaatgggaaaagttagcagaaaaagaagctaaaaaaagatatccgctcgcccaaacgttatttattcaaaaggtgtgggaccggaaaagaacggacgaagcagtcaaacaataccacttgacattgcgggatggcgcaaaagaatttggtgtgtttgttacgatttcttttaatccctacagccaaaaggtaaataaaattgccgtcattgaggaataccaataaggccctcctgatacaggaggaccttatgtgtgattcgctttattttttccgctgcatccacagcttaaaactgtacggcaatattccgaaccagtgctgagaagccggcactttcttttctttccgcacttcttttcgctctctccgttcctgtttcggcgtatcgaaatatttaacgaattgctcagtcatatattttacataatcatttgttttcacggctctcacctcatagtgctgtctttactatgaagtgttgtcccgccgcctcttttttatacttccgtccattgaatcagctgtttcttcttctgatcgaacaaaaggtgagcctcccgtctcgtgcctgacactgtttcggcctgaattgtaacctgaaccgtttcccggcgattactcccggtgatgcggaaggaaacagttccgtacggaaaacgctgtgtaccagtttggaccttttgtccctgtgtcatatggcggcttgacagcagcgcgccgttttggagcagattctctccgatccagtactccccggcctctttcgcaaatgtttttcgggtgatgaaatcagatgaagtatagctgatgacaagtaaaactgcggcagaaacaaacagaaccgcgggatagataaaaccgtcagatttgtacatttaatcaccttttaaagagctgtaaaccggaatgaccgcctgattctttttacctgtaacgcttgagatctctaataagagcaggccgtttttcacatcagccgttaatgatgccgcgttttgcaggatcggcacgtggccttttccgtttactcttttccttatcatcttatgataaatttcaaaacgcacttcttcgccccctgttttccggcatgctaacgccaatccgccgtccgccggcttcacagtctcagcctgtttacattcgttcatgatctgctgaacggcaatttgatgctcccggctgtctaatccgccgttatcggtccggtttgataaaaacagatgtaaaatcgggcccagggtgcctgataggaaaagacagactgccaaggagaacaaaacattaagaagcgtaaagccagtctgttttgagaatgctgaggcacatttctttttcgccgcggtcagccgcacacactttgtaatactcaccatcccccttccacttcacaccgggagacggcggcttttttccggtcatcatataagtgctgatatgtttctgaagaagctgatacgcttcctggcgatcttctattttcagaccatctgtcagcatgcctgtccagaccggaatgatagacgtcataaggaacagccaaatggccattgctgatagtgtttcaatagtagagaaccctttatttccgtttagcatggacatttccgctccctaagtaaactgtgatctcataggtgaacccggcgctcttcaatcgaatctttcctcccgaattcggatggcctttttcgttaaattcaaggctctccggtaaagtcacaagtgtaatgtgaagcgaatcaaaagaacgctcgacaatccttccggctgactgcagtttgtatttatgctctcttggaagaaaagtgatttttgttcttttatgttctgcgatagccgtttcctgcgcaagctgaatatctttttgaagctgttctgttttttgccgcacggcaaggtgggtgcagaccggcggaaccgtcgtgaacaaaaccgtcagcaggacggacgccaggcttaacacaatcaggctttcaagaagggtaaacccgttttctgtccgcctgttattgttcaactgtaacttctccgccactaattaagatctgtttaccattcgggcaggctgtattctttttgatatacccctctgattgtaaatcgttcatatccggcattttaccttcatggtcgatttcgtacgccgtcacttgggctttcaccatattctgcagtccttcacagcctttatgctgaatgctttgattatgttttgtaacgttaggaatggtgattaaaagcagaatggaaacgataaataaaacgatcagcatttcaattaaagtaaacccatcttgatttttcagacgaagcactcccttacatttggttcatcatctggtacatcggcatcagcattgacatgtagacaattaaaatcataccggccacaacaccgtaaatgacaggctggagaatgccggtatacttcgccgcgttttgttcaagacgctccatcataaactggctgtacgtataaagttcgcggtgaagcaggccgtttgcctgtccgtggctgactgcagccgcaagatctttttcataacacggatgcccggaaagagcggattctatggtttctccggctttcagacgtgtaatgagcatctctgcttcttcacgataaaaaggcagaaaagattgttctttaaaagctgttaagctgtcatagatagaaaggccggatttcagaagactgctgagctgtaaagagaaaaagtagctgttaaaaagaacggccgcttttcccaagaggggtattttcacaacaatgagcattttatcttgcggggattttttcttacataagaaccaaacgtacaaaaacaagcagaaagcggcggacagcgccagtgcgcaggcttcatgaaaatgccgaaaaaatgcaaagatgaaagcagtcgcaccggatgtattcatattcattgattgataaatcccagaaaactgcggaataattaaactttgcaggatataaaacatgacacagacggaagaaattaaaaacatcggataccggagcatttttttgatttgattcgtctgcatgagctttctctgtaacaaatcgccgctttgtttcatcgcccccggcaattctccgtgtttctccgcgaaatagcagatagagacggcttctttatgaaaagacagtgcctcaagcacttcgtaaaacgcatcaccttccctcagcctgcggattccgtccgtcagctctgcaagctgacgtttatgcagctggagtttcagcagtctgagcccttcaatcagactgtatcctttttccgtcatttcaccgagccttttcaaaaaagccgcttgatccttcaacggccaggttcgtttaatccgcttcatgatacacccaccgatcgtaattgtcggttgtgacatagccgagcgcgattccttttctgatcagcctgcggagcgtctgatattgaaaattggcgtgctctccctttgcttcctgaaagcattgggtgaggtttttcccgtagagcagttcataaatgcccgcacggcgggtctgcctgtacatccggcagtacacggaacagttttcctctttgcagaacggacatgttaaatcaaccagacgctgagcggcaatggcaatgacggtttgttcaatttctgtcatgttcaccccaaactccagcagcctgtatatggcgcccttagcatctcttgtatgcaggcttgaaagaacgaggtgtcccgtcatggccgcgcggactgcgatttcagccgtttcggcatctctgatttcccctaagatgatcatatcgggatcatgtcttaaaatcgcttttaaaccggcggaatatgtgactccggctttttcattcacctgaacttgcaacacatcctcatctcttgtttctacggggtcttcaagcgtgacaatccgccggttgaaatgccgttttgcatagttgacaagcgagtaaagagtggtcgtttttccagagccggtcgggccggtaaacagaagcaggccgtgtgaatgcttcagaaaggacaatagtgcggcgcccgccccccgaaataaggacagtttatccagagggggaatctgccgcttaggcaaaagcctgatgacaagactttcatcattcattgtcggcaaggttgacattctcaaatgaacggtttccgtcggaagcggcagagacaatgaaccgttttgcggcttacgtctttctcctatatccatggccgataaaaacttgaaatgagaaataagccttacgcattcctctttttttaagactctttttttcacaagagcatggccgatgcgaaaatgaatgaaagcatccttttctctcggcacaatgtgtatatctgaagcccttgccgtataggcctcgtttatgatgttcctgctgtatgtttcaatatttttcacaagacttccctccttccgcacgtattgtaaatcagatacacaaaagccggcaaaggagagattatgcgttttacactgtgtaaaacgcaaaaaaataaaaaataagccccctgacattgatttactgaatgaaatccggaaccattcggccattttcagccatcaaaaaagcaggcgtatgcctgctcttcttagcgtttcttttctttccgcaaatattttttttgatgctccctcaaaatgtcccctgtccagcctttctgccgcaaataaatataaatcagcagggttgatacaataatgagcacgatggaacagatatacgcatatttccaatgaagctccggcatgttatcaaagttcatcccccagagagctccaagcgccgtcatcggtgtaaagagagttgtaaaaatcgtcaaggctttcacaatttcatttcctctttgggaggtaatgacttcctcggcgtgcagcagattgctcagttcctgatcaaactcattgatatatgtaatccctctttccatcttatgatgagctctgaggtaatctttctgcctgtcatttttcggaagaaacgcttcttttaaagccatttccacttttttagcccccagtgtaaggcctttccaaatgaacagctcatggcgcagtttatgcacattttccaagattcctttgctgttgtcatcatgaatctgccatttcagcgtccgctgcttgacttcaaattcatccagtccgatcagataggaattcatcagctctcccagcagaacaaaaaagccttcaatcggattttcacaggtttgaatctgctgtgtggcatgcttttcttttacaccgcgcagcagcgaaaaatcaaaattaatcgtaaaaaagaagtctctcgtaatataaaagtgaaatacggtatggtttttttcatcatctaatccttgatgatagattaaagatccgaaaaccgcttcattattctgatcatttgtatctgagcgcagaaagtttatatgattttcatgttcaaaccacttttcgcattgcggccagtgattgtgatggatcatttttttcgcttccgttttttcatgcggaccgagctggtaccacagccagtccgcacccgaatgtaccttcatctcttgtcatcctccagtatcgctttcttgttttattaccgtaaatgaggcgggctaaaccaggttcgatgtttgagcagctttctacagtggtattattccgaaaaaagggaggtgcaagccttccttcgcggaaggcgttacattgtatatcatcaaactatccgccatcgtactatttatattattaacggcgtgttttgtcgccatagagttttcaatcgttaaagcaaggcgctcccgtattaatcagctcattgaggaagatgtaaaaggagcaaaagcagccaagcatgtcattacacacctcgatgaatatttatcggcgtgccaattgggcatcaccgtcaccgctttggggatcggctggctgggtgaaccgacagtcaaagcaatgcttcagccgttatttttaaagaccggagttcacgaagcggttgcccaagtactgtcattgatcatcgcctttctgctggttacatatgtgaatgtcgtcatcggcgaactcgccccgaaaagttttgctatccaaaaagccgagcggattacacttttgtctgccagaccgatgattttgttttataagttaatgtttccgttcatctggctgctcaatcattccgcccgcctgattacagccatgttcggcttgaagcctgcttccgaacatgaaatggcttatacggaagaggaattgcgggtgctccttgccgaaagctatcgaagcggcatgatcaaaaaaagtgagctgcattacgtaaataacatttttacatttgataagcgcactgccaaagaaattatggtgccccggaatgaaatggtgagcctgccgttagacagcggatcgggacatatgctccgggacattatcaaaacaaataaatatacccggtatcccgtcgtaaaaggagataaagatcatgtagtcggcatcatcaatataaaagaagttttattcagattcctgtcagaaggagcggcgtttacaaaacacgaactcagcccttacattcagccggcgatccatgtgattgagacgattccgatttatcaattgttcgttaaaatgcagcgggaacacgcccatatggccattctcattgatgaatacggcggaaccgcggggttagtaacggcggaagatatcattgaagagatcgtcggcgaaatccgcgacgaatttgatacggacgaaacaccttccgttcaaaagcttgggaagaaccgctatctcctgaacgccaaattgctgatcagtgacgtcaatgatttactcggaacagagattacggctgatcaagtcgatacactggggggctggtttcttactcagcatattgacgcgaagcccgggagcaccattgattttgaaggctacacatttacggtaaaagaaatcgacagccatcatatcatgacgattgaagctgacaaagctgaatagctgagggagaaatccctcccggccattcagctttttatcatcttaatgattcttttacgataaatccgttttttgccagcgccttcgccagactctgctccgttttcacctgagaaaaatcgatgccgagcttcacgacggtctgcgcgatttccggcctgatgcctgagattgtcgtttctatgccgagaagttttgtgctgtcaatcactttgaaaatctgataagcgaccatcgtatccacaatcggcacacctgatatatctaaaaataaataagaaagccggagtgaagaacattggtcaagcaccgattccaaaatcatttttgcccggtaggtatcaatttcgccgacaagcggcaaaattccaataccggcggcaatcggcataatcggcgcgctcagttcgttaatcatttccttttgggcgtttaattgtgtaaccgtcactttataatattcctctgtaaatacttcaatcatatggtcaattgctttgttcagcttctctccccaatggaataccgcattcgccccgggcttctcagacatcgtttcgcagcatgtctgtatacggttccagaccaatctccggaattctttaaagctcgtgacgctttcatagaccggtacttcatggacggcccggtcccttgcgaactgaagcgcccactttgtcagctcctcttctccgccttctttttccgataaaatgccggcaacgatttcaattaacagacggtgctgcatttccgctttctgatcatctgaaggccgccccgattttggtatgagcagccactggcgtgtgatttcacctgattcttcaattaaggttcgagataatgtttcattcaaatgtttcacgggtctcctccattcaaattactttgtatgtataaatcggcgccggacgcacatactgtaattacatccgatgggctatagccaagcggtaaggcaatggactttgactccgtgatcgttggttcgaatccagctagcccagtcccgcaaccgcaaaaaacgaagattagctgataaatttgatcagcggatcttcgtttttctcttatgatacagattgatgtaccgtttttttcttcgtcagcttcatcagttctcccggattgtatccgataacgagcttattgcgatcgatcagaatcggacgccgcagcagtttcggcttctcagtcaaaagcttcagcacttcatttacagtcatttcttcaatgttgaggttgaggtttttaaatgtttggcttctcgtcgccaatatttcatcaattccttcggtcgttaatgataagatctgtttcaattcatcaattgtcggtgtctccctgaatagatgtcgctcttgaaagtcaacattgtgggcttttaaccaatgtttcgtttttcggcatgatgtgcagctcgggtatgaataaaaaataagttctttcatttttaaaaattcctccctcggataatccgtctctttgttaacataagtaccctgaactttttttccctaaacgtatttcaaaaagatttttcggatcttttttagagaacggcataagatataaaacacagggaaagacataaattccacaataaatataatcatgaaaatgtttacattttgagtgccgatctattataataaacttcagatagactctcgggaggggataaggaatgaatcgcatgttccgggtgttaggattttggacggggatatttgcagtcatgttttttctagggggcatgaaagacgcttctcttttgttttttggacagacgatctttttcgtatttctttcttatttgaatctgactgagcggatgtatatttatattttcggagcttacttaaccgtatttttcgccggatttacatactactctatttttattatgacaccgggcggcggaacccactgaacagaaaaagacagaccgattatggtctgtcttttttcatttacagtgaaaaaccattgataaacgggtttcgctcctgctctgtctggatgtccgtttccggcccgtgcccgcttaacacaagtgtatgtccgggaagcgtgagcagtttttgatgaatggaatcaagcaatacgtcctgacttccgccgtgtaaatcagttcggccgatgcctccctgaaagagcacatcacctgaaatcaccagatccgcgtccttcacataataagaaacgcttcccggtgaatgtcccggcgtaaacaatgtctccaaatggaaaggcccgatgtccaaaatgccgtcgccttcgatgagccgttcggcgggccgtgccgttacggcgatgccccgcaatatgcctgatccgtttaaggaagagtcctccagccacttttcttcatttttgtgaaggtatacgggaacatcccatctgtctcttacttcgtcaagtgcgccgatatggtcaaaatgagcgtgcgtcagtaagatggccagcggcttcagattgttttcttttatgtaattgttgattttgtccgcttccccgcccggatcaaaaataagacaggactgatcctcactgacaagaaaatacgcgtttgcctgaatcggcccggccggcattcgtctccatttcactttcatcacctctttatgtatatgcccttattatgaaggttttctgcggaagattcaatgaatgcggccgggaaaacgctatcgacaaacaaaatgaaaacggttaaaatgaaatggaaagattttcaggttccaatgacaaaggaggagcatgatgttacttgttgtaatcttcggccttgtcgcattattagctgtattaggagtcctgcgggctgtcagacagagaaatatcctgggatttttgttagccgccgccacgctgggcgtgtttggctggtttaccgtaatgaccgttgtaaccagcggctatccgactgcacattaaaagcctgtatccaatggatacaggcttattttttattgctgcaaatgtttgctgacacttttgattttgctctccagcgtcgtttctttatcacgtctgtcatcaatgcggatatttgtcgccactctgtgcagccctttttggaacggggcttcgtgaatatcctgaatgactgcgaataagtcgctcagctcaccttcaatcaacgtgttcatcggcgtgagctgaaatttgattttgccggcagctttgtaaccctccaaaattttttgcacatccgctacatactcactgacgctcggtgtttttgttccgatcggaatgattgtgacatctgcaattgccatttggttcaaactcctttttcatttgttatgattggttctgtcatgcccgttttcagtgaaatcagacggtcatacgtaaagccgtataaagcgtattccccgttcggagagatctgaatcggctccatttccgtgtttttgagcaccgtccgctcccgttcgtctcctaagtcaaagctgatcagattgtaagagcggccttcaggcttaaatatgtaaaaccgcttgtgtgtctgatcgtaatcatattccatcggcgcgaagctctcatactttttttggagaggaaagcggtgtgtcacggatgccggcttttggaaaaagaactcgccgtctccgtccgattgatccgttggtctgacggcaatcgtcatgcccgggcgggaatcagcccagatgacgtgatgaagcactcttttttcttttttcgtctgcaagtcataagaatataaaggaccctcttcctccgtttttccttgcttgatatattggaattcatcagtggaggtccaatggacaaaaggggcctgaacgggactcttttttaaaatgccgttgttcatatcggccgtataggctgtgaagtcccatgtttcagtaaaaacggtaatcatcatttgatacgggtcatacggattccaagccgtctccagctcataagagttaaaggctttgtgataaagtcttttcccctgcttgttcataagcacaagctcagtctgaccgctgcttgtcacctgtacgagaatcagctgttttttccggctgatctttacattgacaatattgccctttgtttcatagagccgttcggattttccgctgaaaagatcatatttcatcagctgatgatgtgctgtatacagaattgttctgttatccagccatccttccgttttttccgcttcctttttactgagcggaacgattttctgttctgccgattttgccgaaacgcctgtgtcttgctgctgatgagatggttcacaggccgctaaacacagaacgaatgcggacagcagaacacaaaccaagtatctcatcagccttccctccattcttttctattgtcccatatttgtttatgtaaacaaatgagaaatttcacagatgtctcaaaaaacaagcgacctccacaaaataccttccgtcgcttgataaatatcagcaaactgatgaaaaggcaaagggttttttcccttcccgagctcaatggtatagccctcttttccatactgctgtataaaccaatccctaaaaccggcatggctgtcaatggttttaacgccttgatagcggtttccgcttatcgcttcaaactcccgaatcatctgggatgattgctccggttcacatccttcgtatccccagtaaatctcttctccctgcgtatgaagcgcgatcagccggtcaggtggctgttccgttatcagccggtgcatcgcctgcgcctccggttcagtgagcggcgccgttcctggaaaatcacggtatgaaggggctttcggtttgcgcctttgttcaatatcccaattggatgggaaatgtttatttaaatccacaccgtttatattcgccttccattcgcggaaatccgggcggtgctcatttaattcgttgaggaattcttttttttctgataaatcttcacatccgtaaagtacgagatcaacaccgtcgggatttacgagcggaacgaatgacaatgatgtccggctgaatatatcaagcacagactgcccgaaaacggttttattttcgcataatgccacggaatattctttacaccatttaagcgcgaccgaggtggtgatccattcattggcatgaaatgaggcgtttacatggacttttctttcggccgtatccgcacctattttcagctcataaagcggctttcccaatacggaactgccgattttacggcatgtgacaaacggaaagacatccgttattttctcaatttcttcataaaccgattcggagccgtacaccttttcttccttcacccattgatcagcggaaagaacgctttcacagtgccggatgtatcgcgaaagcccgctcagcgtctcaagcggcggaccctctgactgcccgctcacggcaaagccgggacaaaataattcatcgctttccgccgttttatcagcggctttcaacagtttttcatcaattgaaagcacctttgcaatatctttcatatgctgtttcaattcaggtttgacacgaattcccgccatgttcatcccccttttttaaaaactatatgacaggggagataaaaaaagaaagccgcccgcgatatgggcaggcagactttcttcagcagttttgatgtttgagccattcatttttggcaatccacgccccgccgatgactccggcgtcatttccaagtgccgcaatcgaaatatcggccgcttccgcagaacgcgggaacgcggtgattttgaaggtctcttccacttttgaccgcaggatttcccccgctttagacacgcctccgccgagcacgatttttgtcggattcatggcgcttgccagatttccgagcacgaggcctaaatgttttgcgacataatcgacgacttcaagcgcggtcttatcctgctgtttagccgcttcgaacacgtcacgtgccgtcagatcgcgcacttgtaagagcgaagagtcggaaaccgccgcaagcttttctttcgcgatgcggacgatgccggttgcggacgcaatcgtttcgatgcagccggattttccgcaattgcacggagctcctccttccggaatactgcaaatatgaccgatttctccgccggccccgtttttaccgtgaacgatttctccgttgacgatgatgcctccgccgactccggttccgagcgtcactaaaatgacatctttggccccgtcacctgcacccttccacatttctccgagcgccgcgatattggcatcgttttcaatgacggccggaatacccgtttccgcctcgagatggtctttcagcggatagtttttccaccccatatttgtcgtctcatagaccattcccgtcgtcatttccacaggtccgggcgctcccattccgatccattttacaatccgtttcggcttgttcagttcttccagcttctgatcaagcgctttggcgatcgtgaccgtaattgtgtttccggatttatcggtcggaacttcccatttatgctgaatttcaccgtacatgttgataaaggccagcttgatggttgttccgcccagatcaatccccgcaaaccatgtatcttccataataatctccttttcttattaaaatcctgctgtgttaactgcctctgatccgctccgattctctctgaagaactccggcggctttttgccataaatctctttcaatcacgtttgacaagtacatttcctttaattcatctttcataaagtcaatttcggcttgtctgtcaccgaaataaacaatatgtccgaatgacttaaacagctgctgcacgtcataaaatgaattcatcttcttcaccatttctattcttcttagtataagcgtatttcatcactgatccgggcgtcaagcaaaaaacgattggagaaaatatccttgtattattttcataaattgtatattcacaattgtaaaaaaacactcatttatgcgtttttctgttacaatactttcgtgcccaaaagcacaaaaggattaaagtttgatggggtgttgttttgaaacaagaaaaaaggctgacgttcatctcagccatcagtttatttgtcttgatgttagcagtcattatttcctgcctgtttttctttcatacagagccgcatatgccgctgttcttttgcgtcattattctgtctctggcaggtttgtggctcggtttctcgtgggagagtcttgaaaaaggaattgtcagcggattaaaaaacggggtgcagccgattatcgtgctggctttgatcggtgtgctgatcggcgcctggatgtacagcggcgccattcccaccgtcaccgtttacgctttgtcaattatacagccgagtcagctgcttttgaccgcattattttcctgcatgattatcagcacgcttgtcggctcaagtctgacaactgtcagtacaatcggcgtcgcgctgttaggggtagcaagcgcggcgggagttccgctcgaatggacggcgggagcagttatttgcggagcttgtttcggtgataaaatgtcaccgatgtccgacacgacgaattttgccgccggaatcggcgaaattccgatttttaagcatattcgccatatgatgggcaccaccgttccggcactgctgatcacgatcgttcttttttatattctcggttcatctgtttcaataaatgccgcttcaacgcaaaatattgaggcggtcatttccggaataaaagaggccgtgcacgttacgccttggtcgcttctttcacctctgttagtgatcattttagctgtgagacgggtttccgtgattccggtgcttaccgccggtattatttccgcagggcttctgactgctgtttttattcctgacagcagcattcaaggatttatatccgccctgcaaagcgggacggcgtttaaaaccggcgaccaggctgtggccagcattatcaacagaggcgggctccaatcgatgatgggatcagtctctctgattatgatcgcctttgcgctcggcggcctgatggaaaaaacgggcctgatcgcggcgctgcttcaaggattgataaaaggcgtgcatacgaaaggacgtcttgtcatggcgaccgtcttctcaagtataggcgtaaaccttgcgacaggtgagcagtatttgtcgatcttaattccgggtcaatcttataaacctttatatgacaagctcggcattaagcggattcaccttgcgcggtcgcttgaggacggcggaactttgatcaacccgctgattccctggggagtaagcggcgcttttatggcaagcgcattaggggtttccgtcgtcgactacctgccgtttacctttttcctgtacatttctcctataatctcaattctgctcggtttcctgaaaaaaagctgacaatacgagaaaacctgccgttttttaccggcaggttttcttatgcaaaaaatcccgcttaaaaaacgggatttgtttaaaatgcctgctgaatgaatttgtttctgataaacggtatttttaaaaagaaatgaatgaatgtccgtctgatccccggctggctgagcacgctgttcatcagacggtagcggttttggtaaacggctaaaacagatacggcgcataatgagtagatcaacaattttttcatcttatccctcctgcccctatcgtttgtcaaacagcgagaattattccggtgcaaaaagttttttatgcgattaagcgatggtttcagattcagtcacgatcatatcgaccggaatatcgtggggcatgcggggaatgcggtctgtcagctggcagtcaaagagaagcgacacggtacggcctttataaccggacaggtaccgatcataatatcctccgccgtatccgattctgaagccttcccggtcaaaagccacgccgggcacaatcacaaggtcaatgtcattttgggcggctttttccgtcagactctcgatcggttcgctgaggcccgcatatacggtttccagctgatcatacgcagaaaatgtacggaactccattgctcccgtctgcggaaagcattttgggatacagacttgttttttctcttgccaggcctgttcaataatcggccgtgtcggaatttccaggcgtgtcgagatggtaacggcgatcacgcgggcctgtctccattcttttaaagaaaacagcgtttcacgcatgctgcggcattttttctcccattcactttctgtcatgtcagaaagctttgcttttatatcggttctgatttgtgctttcacgtttctcaaacctccctgaaagacaaaaaagccagaactttattgaaagctccagctttttccgctgtgttaaacagcttattttgtttcacggtgtaacgtagattttttatcacgtgggcaatattttttaaattcaacgcggtccggattgttgcgtttgttctttttagaaatatagttacgctcaccacattcagtgcaagccaaagtaatattaacgcgcattattttccctccaaactaaatatcatttacttattcagacttatatataataccactataatggacggaatgctagagctgatttacatgaaatgttgtttaagtgcagaaaacatcagtttacgcttctgatcctctgaatgagcttgcgtcagaagaaggtaaaatatgacgaaacaggacaaaaaagggctttctgatacgaaatctatagagaaataaccgtttgctccccgagtaaaaaagattttccgacaaaattccgtttttttctctatttcctttagaatggcggcgttttatggtataaaaaagaagggcaaattaataatagaaggtgatgaaacgtggaaattgctattattgcgttgtttatcgtcagtatagcgcttattgcattctcatattctcaaagagatccgatgaaagacgtggaacaggagctagaaacgcttcagctttccgccatgcaggaaatttacaagttgaaaaagaaaatgacggtgcttgaagaagaattgctggaaaccaacctcgtgatccgcaaagccaaaagcagcggcataaaccaaaaaatcgccaaacaaatcatttcaaaatataacaacggaatgtctgcggaagccatcgcaaaagcggagcacgtgtctgtcgaggacgtcaataccattattaaagataatgagaaggtgctcgtatgacaaaacggggcattcaggcttttgcagcaggcatgattttagcgacggccgttctcgccgctgtcttctatttgactgaccatgaccaggcagccgccgttaaaaccgaaaaaacagcattgacagaaaaagaagtaaacagctacctcgacgatcagcataaagtctccgtcaaccgggatgactatcaaaaactgcttgattctaaagaaaaatcgttaaacaacgaccaaaacacagacgccaaaaagaaaaaagtaacatacaaactgacgattaaagacggaatgagcactgctgatgtgtcatccattcttgaaaaagaagggattattccttcagcgaaagacttcaatgattacgtcattgacgcaggctaccacaaagaaatccgcgccggccatttcaaagtcgattcagatatgagctttaaaaaaatcgtcaaaacattaacccgctaaaaaagcttgcaggcatcgtccattcagatggatacggccggcaggcttttttaatagacatataaaacggacccggttaatggccgggcccgtttttttcatccgaattttccggtgatataatcatgtgttttttgatgatccggctgagaaaatattttgcccgtatcgccccactccaccagttcgcccatatagaaaaacgcggtttgatcagagaccctcgcagcctgctgcatgttatgagtcacaatgacgattgtatacttttctttcaatgtcaaaatcagctcttctattttccgcgtggacacgggatcaagagcggacgtcggttcatccatcagaaggacgtccggtttggtggcgagcgctcttgcgatgcacagccgctgctgctgaccgcctgacagtgaaagcgcctgttggtgaaggcgatccttcacttcatcccagagcgcagctgcttttaaagattcctcggcgatttcaagcagtttctttttatttttttcgccgtgaattctcggaccgtacacgacattctcaaatattgactggggaaacggattgcctttttgaaacaccataccgatctgttttcttaattctgccgcatccgtcttttccttcagcagattgcgcccgttatagatcatgtcgcctgtcactttgacattcggggccatttgcagcattaagtttaatgttttaataaaagtggatttcccgcagccggacggaccgatgatcgcagttaccttccgctcctcaaaaccgatcgtaatgtcttttaaagcctgatgggctccgtaccatacgttcatgccgtgaatatcaaataaattctgtgtgtgcaccgcttccttcacaagactcacagtccttccccctatccgaactttccgttaatgtagtcatctgtcttttgcgctttaggactcgtgaaaatttgttctgtctgcccgtattccaccacttccccgtttaaaaagaaagccgttcggtcagacaccctcagcgcctgctgcatgttatgcgtaacgataataatcgaataatcttttttcagttctgtcaaaagcgtctcgattctggcgtttgaaatagggtccagagctgaagccggttcatctaaaagaagcacggcaggtttcatcgccagcgtacgggcgatacaaaggcgctgctgctggccgcctgataacgacagagccgatgaatgaagccggtctttgacttcatcccaaagcgccgccttcgttaagctttcctcgaccgcctcatccaaaacggctttcctgcgttcccccgcatacttcagcgcatgtgtgatgttattgtaaatggatttcgggaacggattcggtttttgaaacaccataccgatttcccgtctgagagacacgacattaatcgcttcacccaaaatattcagcccttcataaaggatctctccctcgcttcttgccgaagcaatggcatcgttcattctgttaatctgtctcaaaaatgttgatttcccgcagcctgacggaccgatcagagccgtcaccgcatgtttttcaatattcatgtttacatcttttaccgcttgtttgtcaccgtaataaattgataaatgcttcacttccaaaatcgaagactccggcaaacgctttgtctgttccgcttgttccctgatgatgtgatcgatcatgttttcgcctctttccgattaatttgccgtaagctttttataaatgacagacccgagccatctcgcagaaaggttaaacaagagaaccgaaatcaccagcaccgccgagccgccgtttgcaatcgcttcggcgtcagggatgattccctgcgtattgacactccatatatgaaccgccagcgtctcagccggcctgaaaatgttgaaaggagatgattcagaaaatgggttcaaatccgtaaagttcagccgcggcgttgtcagccccgctgtaaataacaatgcggccgcttctccgaatactcttcctgatgccagaatggctccggttaaaattgaaggaatcgcactcggaatcagcaccgttttgacggtatgccatctcgatacgcctaaagcgagagaagcttctttcagctccttagggactgcagtgagcgcgccttctgtcacccggaccataacgggaaggttaaagaccgttaatgcgagcgcgcccccgataatcgtgtagccccatccggtcaggtttacaaacatcagcatgccgaacatcccgatgacaatggacggaagcgaagacagcacctcaatacacgttctgataaaatcggtgattttattttggggcgcatattcagccataaagacgccgcccccacaccaagcggtatcgtgatcagcatggtgataaacagaatgtaaaaggagttaaaaagctgatcccgtattccgccgcctgaggcaatggcgctcgattttgacgtaagaaaacgcaaggagatttcagagacgccgtgaataagaatgtacaaaaacaatcctgccaaaatcgccgcgattacagcggcgcataacccgaatacaccggtggccaatttatccgttattttccggttcattacactttcctcctagatgacaagtagcgtatgagcaatataaacagaaacgacatgatgagaagaacaagccccatagaccataacgtattattttcaatactgccgtatgtggtatggcccatgtttaacgtgataatcgtcgttaatgttcccgccgtatcaagcaggctttccggcagaagctttgtatttccgataaccatctgtacggcgagtgcttctccgaacgctcttgccatcccgagcacgacagcggtcagcaatgtcggaaacgccgccgggataagcacctttctgattgtctgccacctcgtcgccccaagcgcatatgaaccgtcgcgaaggtgtttcggaagtgacgcaagcgcatcagcggaaatcgatgtaacagtcggcagaatcattaccgagagtacgatcgtccccgccagaaggctgtgacccgttccgcttgatttaaaagagccgataaacggaaccaatactgtaagacctatgaatccataaacgacggacggaatgccgacaagcagctcaattaccggctgcagcaccttttttccccaagtcggcgcaatttccgtcataaacacggcacccgcaataccgaggggcgctgcgatcagagcggacagaatcgtgaccgcaaatgatccgaaaataaaaggcagcgcgccgaactcaggttttgcctgggttggattccaattcagacttgttaagaactcaatcgggcttacaccatttacaaaaaaagattgcagcccctttatgccgagaaaaattgtgatcgccgctgatgccgcaatgataatcgcggcacacacagacacaatcacccttccgcggacttcatccaattgcctgttttgttttgagcttattaagcgttcgcttacagactctttttctctgtgatttatcatttgtttacactcctataaagaagaagaggcggggagcccgccctcccctcagctttgcttgccgtttgcgtcacgtgtgactttcatatcagagatcggaatgtagccctgatcttttacgatacttttctgtacttcatcgctgttcatatagtcaagaaacgtttttgtaaggcctgacgcttcacctttcgtataagagtgctcgtaagcccaaatcggatactcgcctgtgacgacgtttttctcttccggtttgatgcctccgatcgataaaggcgttactttgtcatcgtttatataagagaatgccagataaccgattgctcccggcgtttccgcaatgatttttttgactgtattggaggaatcctctgtaatgccctctgcaggctctgctccgtcaagagcatatttgacgaacgtagcgcgtgttccagatgaatcaggacggttcacgagtgtaattttttgatctttaccgccaagctctttccagtttttaattttacctgtaaagacgtctgtcagctgttttttggttatatcctttacgcccgcaccggggttgaccgcagccgccatcgccactaccgctactcggtggtcttttagggctttcgcatcaatgccttctttttcttcagcgaagacatctgagttgccgatttgcactgcccttcagacacttgcgaaagtcctgttcctgaacctcccgcttgcacctgcacatcagcatccggatgtttttccataaacttttccgccgctgccagtactaacggctgcatggctgatgaaccagaaatggttaaagaacctgatgcttttttatcctcacttgcagattgactgtctgtcttgccgctttcctttgcatttccgcatgctgcagcaacaatcataacagcagccatcagaagcataagcatccatttgttttttttcatttcctgaattccccctgcatttaatgtgtaatttgtcctacacgtatagagtaaagggttcttgtaaaatgcgtataaatcaagtgttaaggttttgtaaatccggatgtttttttgtataaaaaaaacgctcacaggttgtgagcgtttttctgttagttgcttgtattgccgttttcagcgtcttcctgaattttatcttcgtttttctgcttcgtattattatcttcttgtttctttttcagctcaaagtatttgtccagagctgctcttcctatatcattcgtaatcgaatatcgatcgctgtaattaatataggcccaaggaacgactacagaaatagccacttccggattatcagcaggtgcatacgcgacaagagtcgtattatacgttccttcacccgtctctgatttgtcaggaccgtcatagaaagattgcgccgtacccgttttaccggcaggactgtatgtcgccgtcgcaaaatcagttgcggctgtcccttttgtcatgacacgtctgaaacctgcctgcacttctttaatgtctgcatgattcatatcaatcttgttcagtacttggggctgaacagactctacaacggctccgattccttttttcgaatcaggctgtctgacctcttttacaagctgaggtttcaaacgatagcctccattggcgatcgttgatacatactgcgccatttgcagcggtgtaaacgtatcatactgcccgatggcaaagtctaacagaagaccggaaattcgctgtgtcccttggtacccggttgcttcattcggaagatcaatcccagtcttaactccgagtccgaactgattgaagtagtatctgaaagtatcgaatgccttcatatcaagcggaagggactggccttttttgtactcccctttaccgacagcaatcgccgttttgaacatgaacacgtttgaggattcctgaagcgctttttggatatctacgggacctaaattggtccatgattttttcgggtttttacttcccttgaaatacataggttcatcctggaaaacggtgttcaaattaatcgcgcccgtctgcagtccggtcaacaccgtcgctcctttgaccgccgatcccattgcgtaggaggaagtcattgcgccgagggcataatcattaattttgtactttccatgatcattcgtaatctgtttgccggccatcgtcagcacttctccgtttttcgggttcatcatgacgacgaaggcccgatcaagaagcttcgtgctcggtctcgcttttgccgatcttaaatttttctcaatgattttttcaacggatttctgcaggtccatatcaatggataatacaaggtctttgccggcctgtccttttgaaatcactttgctgcccgtgacatttccggatgagtcggttaagttctgcactttctctttttgaccctgcagcaggctttcatattgatattctaaatagctttttccgaccctgtcattccggctgtagccgagtgacagatagtgatccagcagattggaaggaagaccttcgttcgcactggatacactgccgagcaatgtccggatcaggcttttataaggataagaccgttcccagtcagacgtcacgtcaactcccggcagttcatctaaatgttcgctgacgacggccatttcttttgccgacaccccttcatttttgatgtattgaggcgtcagtgagtagcctgaatccatctgccttttgatcgcaaggatctgcatatcttttgaagtgagctcattcagctgtttgtctgtgatacgtttcagctgaagctgatataaatcatcttcagacagttttttgtcttcagctttttgcttttcttcggccgtaatcagttttttcgcttcatcaggcctcgttaacatccaatagtcttttttatcccgctcagtcacctttttggtgcttaccttaatcatacccgacagtttttttgcgatttttaaacgctgcgcctgggtggttgaggctgaacgtgtatatgtaatcgcatttaatgctttattcgttacgatgggatttaggttccggtcgtatattttccctctcggaaccgccgtgctgacatcagactcctcctgcttattagcggcgtttttataatcatcaccctgaacgatctgcttgatgccaagctcgacgataatccaagtgaaaataagaaacgcggccaaaaacaaaaaattaagccggatcggcagtgattttttcttttctttgtttacagctattttctttttatttctcctcatgacatcaccttttcttatttacagaaagaaatgacaccttctgttcaggtgtcatttttcattctaaaggttttttcgatatttttctacagataacccttttatctttctccttttataaaattcggttccgccgcctgtttttgtcggtcttcttctactgtttcatcagaagtttccgtatccagtctgatgtcttttataaagtaataaatcagcggatggccggctccgagcagcacgagcgccgccggtattcccactttttccttgaataatgtaacgattacaaggaaacaaaggatggaaacgatcctgcccgcatttaaaaataactccctgagcacaatgtattcaattctggcttttctggcaagccgcgcccggcctatcacatcatatgtaagcgagacatacggcacgagcagaactggatagccgatcgcaataaacactccgtacaaaaggagcgtcgtgaagctcattttaaaaatgataagaaacagggcaccgtacaagatcaatccgccgataagaatcgcctttttccgagctctttttttgatgagccttgatgcaaaataataggcaaaaaaagaaaccgcggaattgacgagaccgaatgttccgagcgccagctcactgtttgtcgcaatgaatacaaaaacgctgattaaaaaaacaaaaatcccttctctcaagccttgaaaaaagtgcgcgttggtaatccggcgccaattcagattcgtgtggcgctcatcaaaaacttttttcagcataaaccggcctttcgactccctccgcttcagaaaaaagctcatgaccacggcaagggcaaataagccgagcgacaggctgaaaatgattgtataacccgtattgttttcaagtcttgaaatgacatatccggccacaatcggaccgatcatgcccgccgatgaagacaaaatgcctaaaaacccgttaaaaaaatctctcgtttccggttccgtaatttcgaacgtcagcacattaaaagccagccagtaaaagccgtatccaactccgagcacggcccctatcaaaacgagacgggaagccgcagtttctccagcaagcagcacacttaaataaaaagcggccaaaaagataacgccgaacctgagaataaacaccctgtcaatttttttagccagccggccggccagcagaaaggtaaccggctgcatcgttacgaccgacaaattgtatatggccaaatcaataaattttcccgactgcttccacaaatacacgttgacaaatgtatttgacagcgcgatgcccaatgagtaaaggccgccaatcgtcaataacagcagcagccctttatttatttcgatgtcgccgataattttttttattttgctcatcattgactcccctttactacacattagtttgtctcactcaaactgagatatgtaaaaggattcaaagtcaataaaaaaacaaggcctcccgcgggagaccttgtttgatcgaactatttattttgcttcgctgtaaagacgggcaacttcatcccagttcacaacattccagaaagctgaaatgtaatcaggacggcggttttggtagttcaggtagtacgcatgctcccaaacatcaagaccgaggacaggtgttttaccctctgaaagcggtgaatcttggtttggcgtgcttgtaatttcaagtttgccgttgtttacaacaagccaagcccagcctgaaccgaaacggccggcagctgctgcggcgaatttttctttaaattgatcgaagcttccgaacgtgtttttgatctcttcagcaagctcaccagtcggttcgcctccgccgttcggagataaaagagtccagaataaagagtggttggcatgtccgccgccattgttgcggacagctgtgcggatgtcctccggcactgcgttcaaatcagcaacaagctcatctacagatttctctgcaagcgctgatccttcgatcgctttgttgaggtttgtcacgtatgtgttatggtgcttcgtatgatgaatcgtcatcgtttccttatcgatatgaggttctaaagcatcataagcgtaaggcaattctggaagtttgtaagccataatttttttcctcctttaaatatatgtactgaaatgccgcttaacgcgaacttttctaatctcaatgtaacaaaagaaagcatggtaatcaatgaaaaagctcacaatccggcgattccagcagacatattacactttatccgttccctgccgaaattaaacctttctaaagcaccgtccataagaaatatccgatcataaagagctgaatgacgccttttgccgccacgcttgttaaaaaaccgattaacgagccgagccccacttttgccgcggacttgatatccttttgatgaacaaacacctcagcgcagacagcaccgataaacggccctaatataatgcctgccacgggaataacgaagggcccgatcaataatccgatcgtgcttccccagattgccgccctgcttcctccgtaccttttaacgccaagtaaatttgacacataatcagctgcgaataaaacggccgcaaataccgcctcaatgagccaaaacaggtaagaataaggactgaaggaaaacaaaaatccgtagagaagaaaaccggccacaataaaaataacgcttggaatcaccggatatacaagcccgataaaagcaatgatgaagaccgcaatgataatcagccaatacaaaacactcatgacaaaaacaccctcctttgttttgcgggcgatcaccgcttcccgctttatcttattatgtatgattccttatcaccgctttaaatactctcacttgtgttcatcccctgtgaacgatacaataagcaacatataccagtttaggctaggaagtgaagatgttgaacatatttacggctttattgaaaagtacatactctccggcagatattgcaaaaacacggtttcaggggataggaaaagcgatcctttatgtatttttgctgtctgtcctttttacgctgccaagcgcttattacctttgctccggcaccgtaaactcaatgaacggtttcaaaaccgtgttaaagaaagatttccctgatttcagcatttcaaacggagaattgcagacgaaagcgtccgcctctaaggaaacggaagcgaacgggttcgtcatcgtctttgatcccacagatgcttacggcgcgaaacaaatagcggcgaaacaaaatgcgatcggcattttgaaaaataaaatggtgcttgctgtagacggacaagcgacagaaatgaattattcgctgatgcctgccgatatcacaaaaaaagaaatcatatcagcattaaaccaaaataaaacaatgatcgtcaccgtcctgtccgttttgctgttcatcatgacagcggcaggcaaattcattgaagtatcatttctcgccgtcatcggcctgatattgaaaaatgcgcaaagaaagacattgaattaccagcagctctggaagctttcggcttattccattacactttcgaccgtattctttacgatcatgcgcgcgcttgttattacggtgccgagtgaatttttagtgaattggtttgtaaactttatcatccttttcctcgtcttaaaagagataccgcgaagtaaaacagatgtataacaaagactgcccccggcggtcttcttttttgtcatgaacaaaatgggacaagcatacaatgaagtaaaaatgtatgcgggaggcggttggaatgaagcggcttacttttgtattcggcagtttatttgtgatattcattatcttttacgatcttaaaatcggcacgatcccttctcaagaccttccagcatacgcagcggcggcacagccagcccaacaggaagcttcatacagaacggttacggtcaaaaaaggcgatacggtgatgtcgatagtcggcgcacataaagcgccagatgatattgcacaagattttgaagcgctgaatccgaatgtaaaagcaaacgccattcaggcaggcaccgcttataaattccccgtctaccgcaattaaacgttaatttcttgtcagttcggcaaatacactgttacaatataacatgtaaatagaagttgcctgacatgtaaaaggctcagcctgcaaaagcggtaactacaattaaggagcgattgacaagtgagtgaaatcacacatcgtacaaaaacgcgtcccgtcaaagtgggacctttaacaataggcggaaataacgaagtcgtcattcagagtatgacgacgaccaaaacacacgacgtagaagcaacagttgcggaaatcaaccgtttagccgaagccggctgccaaattgtccgggtggcatgtccggacgaacgcgccgctaacgcgattgccgacatcaaaaaacaaatttccatccctctcgttgtcgatattcattttgactacaagcttgcattaaaagcaattgagggcggggccgacaaaatcagaatcaatccgggaaacatcggccgtcgcgaaaaagtggaagccgtcgtaaaagcggcgaaagaaaaaggaattccgatccggatcggcgtaaacgcgggatctttggaaaagcgcattttagaaaaatacggctatccgactgctgacggaatggttgagagtgcgcttcatcatatcaaaatcctggaagaccttgactttcatgacatcatcgtcagtatgaaagcgtctgacgtcaatctcgccatagaagcatacgaaaaagcgtcaaaagcatttgattatccgcttcacctcggaattacagaatcgggcacgctgtttgccggaacggtaaaaagcgcggccggactcggagcgattttaagcaaaggaatcggtaacacgctccggatctctctgagcgccgatcctgttgaagaagtaaaagtagccagagaactgctgaaatcattcggtcttgcttcaaacgcggctacgcttatttcatgcccgacatgcggacggatcgaaattgatctcatcagcatcgcaaatgaagtggaagaatacatttctaaagtcaaagcgccgattaaagtagcggttctcggatgtgccgttaacggaccgggcgaagcaagagaagctgatatcgggattgccggcgcacgcggcgaaggacttcttttccgcaaaggccaaatcgtccgcaaagtccctgaagaaacaatggtcgaagagctcaaaaaagaaatcgacaagctggcagaagaacactatgcaaagcttgaagcagaaaaagcaaaagcagaacaagaaacacaaaaagcttgacggatattccgccaagctttttttttgcgttgtgttaaaaaaacggtgtaatgaagatgccaagcacaagggaaacaataccgattcccatcgcccatccgcctaaagcgcctgctcctcttcttctggcgatatagccgacgataatgccgcatgcccctaataaaacagggagcacaaacagggaaatgatagaaatagccaatgctgcataccctatcccccggccttcacttactccgtcccgattatcatcacggtctgctgcccggtcagaagcacgatatggctctgagatttcggccgctgtttcttctgaataaacatcacgcgtgatatcggttccttccgatccatgatccacgtaatagtcgttgccttttcgattttcgtaatcgtatgccaccttcaattccccctttttcttttatgaaaggagcttttttagtttccgcgttttttacggattcatgtttgctaaacttttctggtattgttaattgtttatgttacacttgaagggatgaatttataggagtgtggacatgttacggttaggtatagatattgacggcacagttacggcacaggatacatttgtcccttatttaaaccgctcatttcatctttccattaccttggatgatatgactgattatgatctgacgaagcttttgaacattacagacgaggaattttgggaatggatgaacgttcatgaagcagccatatataaagaagcgaagctcgcggaatttgccaagcaggcactggacggactgaaagaagagcaccgtcttatctacattacggcaagacgcggccacttagaagatgttacgctggactggtttgcaaaccgggacattcattacgatcacattgagcttgtcggaggccatcacaaagtggaagccgtcaaaaaacacggcattgatttatttttcgaagatcaccacggcaacgcgacaatgatcgcaaaagaagcaggcattccggttatcctttttaactccccatataatcagctccccatcgattccaatattatcagggtgcataattggcttgaagccgtcgcctggattaataaaaacaaacacagctttcagcatgttaaaagctgaaaaaaacctcctgtatatagcaggaggttttttatcggcacgccggacaggtgccgtaaatttcaaacttatggccgctgatttcatacccttccaaatcatcgtgcagcttatccatcggacaggactcaatttccttcgttttcccgcaggttaaacagataaaatggtgatgatgatgggtataagagcatgtaaaacggaacagtttttctccggaaagctccgtcgtttccaaaatgccgagttcttcatataacgaaagatttcggtatatggtatcaaaactcagacccggatagtcgtcatttaatgcggcaagcacgtttttggcggtcagatatttatcagaatcagcaaaaagctgcagcatgtcttctcgcttactcgtatatttataccctttttctttcagcaggttcaacgcttcttgtacgttcatgaggacctcccctttacaacacggtatcgctccaaaaagaaaatggcagctgtctgaacagcaggccattttcttatgatgtatcaaattatacctataaaatgatgaaaagtaaatgaaagcctagtgaatcgcggttttgaacttaccgcccctcgtttcatgggtattcatgatcgtaataaaggcgtttttatcaatttcaaacacaatggatttcaatttagtcacttcaagccttgtcacgaccgcgtaaatgacttctttggattcatccgtatatccgccttttccctgaagcttggtggttccccttccaagccgatgcaagattgcgtctgaaatttccgcatactgatctgccacaataatgaccgcttttgtttcatcaagcccctggatgacggcgtcaatcgttttcatggcaatataataagtcatgaaagaatacatcgcctgctccggaccgaacacaaaaccggcccaaataaaaataaacacattgatgagcataacgaattctccgactgagaagggcagcttttttgtgagaaggataccgagtatttcagtaccgtccatcgagcctccgtttcggatgacaaggcctaccccgaaaccgagcaaaagcccgccgaataccgtcgccaaaataggctgggtcgtaatggcctccacatggtgcaaggaggattcaatcagcgctaaaccgacaattccgataacagtagagatgagaaatgtttttccgatatatttatatccgaaaatcataaatggaatgttgagtaacacaacgaataaggcgaaattgaggaggggattggacataaagaggtggtctaaaattaatgaaacaccgataatgcctccgtcgataaaattattagggaccagaaacaattcaatacttacagcggctgaacccgccccgatcagaatcataatgaccctgaagataaagtgtaaaaatgactctcttttatgctgtttatttggggtcataaaatctcctttcctgtaataactattttaaacagtaagcaacttcattttaccattaaaagccgtaacattttaatgatttgctcaatacattatgtctaaagaggtgaaagtatcgatgattttaatacaaagaattattttgcagcggctcaatcaagtcactgcggacgatcttctgaaatattccaagcaatacggaatcagcattacgagaagtcaagcggctgaggtagcggctctgatgcacggaaaaaacatcaatatttttgatgaacaggagcggcttcgcctgctgaaaaaagtagaaacgataacctcaaaagaaacagctcggaaagttgacgaacttttcaaccaattctcagggtaaaaaaggagggggcaattccccctccttttttattgagctgatattttttcaagaagctcctgatcaaactgcttttctttcagcatttcgatttcaaaacggtacggcggcttcttatttttcttgtcttcgcctacatacggtgtttcgaggattttcggaatatcggcaagctgctcgtgatgaacgatgtactgcagagcgtcaaaaccgatctctccgaacccgatattttcatggcggtctttccgggcgcctttaatatttttactgtcattcacatgaaggacttttatccgatcgatgccgacgattttatcaaactcgttaagaacaccgtcaaaatcattggcgacatcatacccggcgtcatgggtgtggcaagtgtcaaagcagacggatagatgttcattatgcgtaacccccgcaatgatctcggccagctcttcaaagcttcttccgcattctgatcctttgcccgccattgtttccagcgcaatctgcacgttttgaccgggaacaatcacttcgtttaaaccttcaatgatttttttgatgcccgtctcagccccggctccgacatgcgctcccggatgaagcacgatctgtttcgcgccgattgctgccgttctttcaatttcagaacgcagaaaatcaacacccagctcaaacgttgccggatttgtagtatttccgatgttaatgatgtacggcgcatgcacgacaatctcatcgatgccgttttccttcatatgggcgcggcccgcttcgatattcaagtcttcaatttttttgcggcgcgtgttttggggagcgcccgtatagatcataaatgtattcgccccgtacgaaacagcttccttgcttgcggcaaggagcatatgttttccgctcattgagacgtgtgaacctattttcagcaacccgagtcccctactttcctttgttagatttgtttcttctctgctttctttttatcttttccatttcgtagctcattttctttttatagcccggcttcacttttttcggttttttcacgaggcgcttcgccatttggtcggcctcattctccgattttttgcgttttttgcggcggtggcggtcatcgcctttcttccattcgccgtttacaagctccgcatagtcaaacacaatacccatcttttcgagtcttacgagcgcatcttcgtcagaaagctcataaatggtcagtgcttggcctgatgaaccggcgcgtgcggttctcccgacgcggtgaacataaaaatccagatcgtccggaagctcatagttgatgacatggcttacgcctttaatgtcaattcctcttgccgcaaggtctgtcgcaatgacataagtgaattccagatcattaatctgcttcattaccttcttacgctcacgcggcgttaatcccccatgcagaagaccgatcctcatgcccttttcagtcaggtatttcgcaatatggtcagccgtgtttttcgtattggcaaacacaatgcccagataaggattcagatgagacatcatatcaaaaagcagcttgtctttatcacgctgtttagaaggaaccaaaacatgttcaatcttttcggctgtgattcttttcggctcaacatgcgcgtacttcggattttccatatactttttcaaaaacggcttcagcttttccggaatcgtagctgagaacacaagcatctgaagttcttccggcatccgcgatccgatataatcaacatcttctaaaaagcccatgtcaagcatcagatctgcttcgtcaatgacgagagactgcgctttatagacgttcaatgcctgcgccttaatcagatccgcgatccggcccggcgttccgacgacgagatgaggctgtgttttcagcttatcaattgatttttgcttgtccgtccctccgatgaaacattttgtccggatcggctcatcttccgcaccctgtgtgattttgagcgcttcctgatgaatctgattggcaagctctctcgtcggcgccgtgataacagcctgcaccgtatcagaacccggatcaatccgattcaaaattggcaataaataggcgtgggttttccccgtccccgtctgggactgcccgatcacgctttcgtttttcagcacggcgggtatcagccgcttttgaatatctgtcggttcataaaaaccaaggcggtgaactgcatctataataaacggttttaagttgtatccatcaaatttagtttctttcatttttcccagctccttaaagcggcacattctgtgtccatcatcacattataaccgattttacttaaaaacaccatgtcttgggggaatcctgttttcgagacagaaaagcaaatgccccctccgatgcatattgtaatagcagagagacagaaaggaggtacaagtatgtttccacagcagccgatgagaaatatggcgcagcagggccggccgttgatgaatccgcgtatgatgatgggaggaagaccgtcattgccgggccggcagctgatgcagcagggccggcagcttttccctcagcagcagattgccggagcgggcctgagaaacgcaggcacgggcggcggagggggcttaaaagggatgctttcccgttttttacccggttcaggaggaggaagcgctgccgcgtcggcaccggcggcggccagcggaggagcaggtgcaggactgcagggaatacagaacctggcaagtccggcatccctgtcgagcatgctcggcaacgttcagaaggtgctcggcgtggcgcagcaggttacaccgatgattcagcagtacggtcctttagtacggagtctgcccgccatgatgaagctttacagccaattaagcagcagcgatgatgagaatgaatctgacgagacaaaagaaacaaacgaacaggataaaaaggatgaagctgaaaaaacagatgaaacagaagatgaaaacaaatcagacgcctcatccaacacatcaaagaagacgtctgaaaaagcatccgcttcaaaagaaaaagacgccgcacaggcagactcagcggaacagccgcgtccaaaaagaacatcgggcagatcaaagccgaaattatatatttaacattctttgatatctcacgaaagattagctataatgagatcagaagaatgcaagatttgagccgtttaactacggctttttatattgcctctacactcacttttgataggaggacatctacattggacgttatcaaaatatcgccgcgcggctactgttacggcgttgttgatgccatggtcatagccaaaaacgcgtcactcgataaaacactgccaagacctatatatatactcggaatgattgttcataataagcatgtcacagatgcgtttgaggaagacggcatttacacgcttgacggcacaaaccgtctggagattttaaagcaggtggaaaaaggaaccgttattttcacggctcacggggtatctccggaagtaagaaaagccgctgaggaaaaagggcttgttacgattgatgccacatgcccggacgtcacgaaaacacatgacttaatccgaaaagtaaaagctgaaggctatcatgtcatatacatcggcaaaaaaggccaccccgagcctgaaggagccgtcggcgtcgctcctgaaatcgttcatctcgttgaaacagaagaagacgtcagaaatctcgatattcaggctgagaaattaatcgttacaaaccaaacgacaatgtcccagtgggacgtccacgatattatggaatcagtcaaagaaaagtacccgcacgtggaataccatcaggaaatctgcctggccacacaggttcgtcaagaagctgtatcagagcaggcaaaaaaagcggacttaaccattgttgtcggcgatccgaaaagcaataactccaacaggctggctcaagtgtcagaagaaatcgccggaacaaaagcctaccgaatcggagacatcagtgaactgaagctcgaatggctgaaagacgtcaataccgtcgccgttaccgcaggcgcatcaacaccgacaccgattacaaaggaagtcatccgctttttagagcagtttgaccacaacgatgaatcgacatggcagcttgaacacagtgtgccgctcaaaaaaattcttccgaaagtaaaaataaaaaactgaggcccggggcctcagtttttttataagaaggtaaatgggtttgtatctgtttcggaagcgaaaatgcgcacgtcatagtttttctctccggccattgccgtaagcttctcagccgtgccttttctcatgatcttttcagcataatgccccgggtccacgacgtttaatcccatcatcatcgcatcatgcgctacatgaaaataaaggtcgcccgtcacgtaaacatctgcacctttccgctttgcctgataaatatatttatttccgtcgccgccaagaaccgcgacctttttcaccttgctgtttcgctctccgaccatccggactccgttaacgtcaaacttttctttcacaaacagagcaaactcttcaagcgtcatgtcctgctgaagttttccgatccggccgaggcctttttcaagcggagactgctccaccggataaatatcatatgccacctcttcatacggatggctttttttcagcgcttttacgacggttttctccatacttgccggaaaaacggtctcaagtctcacttcatggacgagttccagctctcccgtctgtccgataaacgggtctgccccgtccagcggcttaaagctcccgattccctcagaagagaacgcgcaatggctgtaattgccgatatgtcccgctccggcgttgccgagtgcggttcttacagcttcttcatagtctttcggaacatatacggcaagttttttcatcgggtccgaatatgtcgggacgagcacttcagtgtctgtcaggccgagagcttcggcaagcagatcgttaacaccgccgtccgctacatcaagattcgtatgagccgcatatacggcaatatcatgctttatacatttctcaatcagtcttccgcccggctgatcagtggtgatctgtttaagcggccgaaaaatcggcggatggtgggcgataattaagtcaacttttttctcaatggcttcatctaccgtttgttccaaaacatccagtgtcaccatgacatttttcaccggcttattcaatgtaccgatctgcagtccgattttatctccttccaccgcataagccttcggtgaaaattgttcaaacagctggatgatttcctgtccgttcacatgtttaggcatgtccgattacctccttcagcagagaaatccgctctttcaattcagctaatttttcatgattttcatgctttgcgctgcggctgatctgttcataaatttgttcagtatgcttaagttcctggctccatttccgaagaaacacttcattcctctcttttaacaaaaacggacccgcaagcattccgacagccatcggcacatcccgataaggcgcatcacggtcgccagtttccgcaacgaggatttcataacactttccgtcttcttcgagaatcacttcatcaagcagttcatagccttcctgatacagccactctcttatatgaacggcatgaatattcggctgcagaatcagccgttcacgccctgtcaatttcgtttttcccgactccaaaatatgagcgatcagcgctccgcccatgccagcgatcgtaatggcgccggcttctcctttttcaaggacgctcagcccgtcacctttccttacggagataagagtgcttaagtgcagtttttccacctgctgtttggcggatagaaacggtccgtctgtaatttcaccggcgattgcccggcttgccaaatgattcaaaacggcatagcaaggaagatacgcgtggtctgacccgatatcagcaaccagggcacccggagggatatattccgccacagactgcaatcttttcgataacttcatttcattcacaatatcacaacttttctcaggttctttttcctttactatcatataaaaaaaccgcccggaatccaagcggcggatagagtttttcatatgtcttttatatagggaccggtaaagctttatttaatgtcagaaacccattttgccatgtcatccagcttttcggccggcacaaggcccgcgggcatcccgttgccgcctttttcaatttttgttttaatctcagcgacatcttttcttttgccgacgccttttaagttcggccctgacacaccttcatagttttctccgtgacaggtgatgcagttggctttataaatctcttcaggtgaagcgtttgcagtttccttctcggcatttttgctttcaccgccgcttgcgatctgatgcgcatctccattgccttttacagctaaaaagaaagtcagccctattcccagcactgcaatgagcaaaaaaggaatcagcggattccacttcatatctccatccccctttttcattctccccctatgtaaacacttctaattctaacttatttttacaaaaagtaaatggtcttgctcagcaatttcaatgatttcacaatttatacaaaaagcaaaaataactgttttgcttaccacaaaattatctttattctattgtataatgaattgtatacgcttacaataaagaatataaataaacttgtctcatttcccccctttcaggacatgccgcattttttccaaactcatttgcaaaacatatgcttatccagtaaaataaaggtatattatccatatatcttatacataaaaaagaacggatcaaaaagacccgttccattctattcgagaaaatccttcagacgcttgcttctgctcggatgtctcaatttgcgaagcgcttttgcttcaatttggcgaatacgctctctcgttactccaaacactttgccgacttcttccaaagttcttgtgcgtccgtcatccagaccgaaacggagacgcagcacgttttcttcacgatctgtcaacgtatccagcacatcttccagctgttcttttaaaagctcatatgccgcatgatccgacggagatgtcgcttcctggtcttcgataaaatcaccgagatgtgagtcgtcttcttcaccgatcggtgtttctaaagaaactggctcttgagcaatttttaatatttcacggactttttcaggcgtaagatccatgtcttcagcaatctcttccggtgtcggctctctgccaagatcctgaagaagctgacgctgcacccggattaatttattaatggtttccaccatgtgaaccgggatacggattgttctcgcctggtcagcgatggcgcgtgtaatcgcctgtctgatccaccaagtcgcatacgtactgaatttatatcctttacggtagtcaaacttctcgacggctttcatgagacccatgtttccttcttggatcaagtctaagaaaagcatgccgcggccgacataccgtttagcaatgctgacaactaaacgaaggtttgcttcagccagtctgcgtttagattcctcgtcaccctcttcaattttttgagcgtaggtgatttcttctttagcagaaagaagatttacccgtccgatttccttaaggtacatgcggactggatcattgatctttacgccaggcggtacgctgaggtcattaaggtcaaattcttcttcggctttggcaagctgttgaatattaggatcttccgtttcttcattttcactaattaattcaacaccttgttctcctaaaaattcataatactcatccatttggtctgattcaatttcaaagctggacatgcgttcagcaatttcttcatatgttaaaacgccacgtttttttccagtttcagtaagctgctcttttacctggtctaatgtaagttctgtttctgtttcgtgggtttgtttatcagccattatggatccctccttccaaagcttgcaacgaattctaaaagcggtatgtttcttatccgacccggaagccttctctctttttcagcatgcagggctgcggataataatgacaattcatgatgaggttaagcgatctatttgctcctccgcaaggaatcattgccaatcagaacgcaagcctctatttgttgttactttaatgatcggttcaatgcaacaatttcttgagccagagacgcagctttcacgaagtctttctgcctctccgcatccgctctttctgcttctttttcctttatcattgaccattttcggtgatccaacactttttttacgtaatcggataactcggcctctgagagctcctcgtttacttggagcatccctatatctgaaagcagctggctgatttcctcatcctgcattctcgccataagatgctgcggcgtcatgtcagcaccctcttcataaacagcgtacaggtatgctgccagcgcacgatgtccgtcaatgttaaattcaaagccgacacgctcaatcactttcttgatgacgtttcggtctctcagcatatgagcgagcagaagtctttccgcgttctcataggcgggacggagacggcgccgtttcgctttagtcgtcacccgggcccgtcttgtctgcggttcggcgtttttgtcgccgggggcgttttgtctggcgtagatggaaagctgttccgtcaaagattctaccgaaagagaaaattctgaggcgagctgcttcacatacatttcctgctcaagcgacccggaaagagcgctgatttctttcagcacttctttcatataagcgagccggtctccttcgtcagataagtttttccctttgcggaaatattgcattttaaaagccatgaccgtaacgcttgcatcaatgatatcggtccggaatttttctccgccccgggttctgatataatcatcaggatcaagcccgtcaggcagcatgcttactcttaccttacaatcggctttctggagcaggccggccgctttcagcgtagcttcgtacccggctttatccgaatcgtagcagagaatgacctcctgaacatttcttctgaggattttcacatgctcttcggtgagcgacgtccccattgtggcgatactttcttttacgcctgagctgacggcggatatgacgtcagcgaagccttcaaacagaacggctctctcctctttcctgatcggcaggcgcgccttatgaaagttatacagcagcttagatttatgaaacagcggcgtttccgggctgttcatatacttcggctgctggcttccgagcgcccttcctgaaaaagccgccacggctccgtggtgatcatgaatgggaaacataattctgtttctgaaacggtcaaaatacccgctgccgtcttctcttctgatcagcagacccgctttttccatcatttcttcctcaaaaccgcgctttttcaagaatttcgtcatgaaatcccaggaatccagcgcgtagccgatttcaaactcatctatgagctctttcgtaaaaccccttgataaaaggtaatctaacgcttcctggccttcctttgtatttattagcaaatgatggtaaaatttcttcagaagctcgtgggcttcctccatcttctgctctccggaagattcaggcctggatgcagagtgaatcgttatatcatcagggaaatcaatctgatatttatccgcaaggtgagaaacagcttccgtaaatgaatagccttccatctgccgtaagaaagagaaaacgttcccgcccgctccgcatccgaagcaatgaaagatctgcttatcgctggagacggaaaacgagggcgtgttttccccgtgaaacggacagagcccaaagtagttgcggccttgctttttcaattggacataatcacctatgacttcaacaatgtctgctgactgctgcacctgattaactacttcatctggtatgcggtttcccatcttataacactccgtcgtacattattcgatgttttgatttgaaatcccttcatcattcgacaggatttttttaagcagggtaacaaatcgattccgatcttctttatttaattttttaggtcctttggaatgaatgccgcttcttctcattttgcctgacatatgacggctcatcagagcgaagtcaatcgtgtcttcagtataagaacggcccctttccgataagacggcaatatttctgttcagcaaaagagatgctaaaccgatatcctgcgtgactacgacgtctcccgatctcacatggtttgcgatatataaatctgccgcttctttatgaggatcaacgtatacccagttctcgtctttgcttctggaaagctggtagtgttcaaatgatgcgacgaaaataacccgaacgctgaattgcgatgcaatgagcattatttcctcttttacggggcatgcgtctgcatcgacaaaaatcgtcttttctttttcatttagaagactaattctccatccctccatcaatctcctgcataaaaacaagcgaaatcgcatatgctccatgactgcggatctattttgagctttgtcgaaaaatttccgggagttattcttgacatcttacccataatagtttattcgtatcacacgaagcttaaacctaaaaataaacattttatcacaattttttattataatacaaacttcgcgaagatgccatcctttttgtttattccctatttgcatacccaaaaacccaggataaagcgtcctgagttatcggccctttgttttgagatgatgaatgatgttcgctgtttcttcgactgctttattcgaaacgtcaacgacttggcagccgatccggtccacgattttctcaaaatactccagctcttctttaattctgttgatattggcgtaaatggctttgtcatttaagccgagagattttaaccgttctttacgtatatggttcagtttatcagggctgatttttaagccgatgcattttttcggatcaacgctgaacagttcttccggcgggtcgacctcaggaacgatcggcacattggccactttcagacgcttatgggcaagatattgtgataatggggttttagacgttctggatactccgagcaggatgatatcggcttttaaaatgcctcttggatccctgccatcgtcatatttgacggcaaactcgatcgcctcgacctttttgaaataatcttcatcaagctgccggacgcggcccggttcatatttggcggtcaaaccgtaagccgattccattttatcgatgagcggaccgataatatcgtaatacagcacattcgctttttccgcttgttcaaccaggtatttgcgcatttcaggaacaacgagcgtaaaacaaataatgccgccgtccgctttggcgagagacacgacttcattaatggtgccgatatcttccacataaggtattcttctgatatgcgtatcatcggctgagccgttaaactggctgagcgaggcttttacaacgagttcggcggtttctccgactgagtctgatactacataaatgatgcgattgtccatgttatccccccgttagttttcaagcttatatgatttcattttctgataaactgacaagtatcttagtcatattcgttttggtaaaccggccgatgacctcaaagcctttatccgtatctttaataacgggcagggcatcgatctgtttttcaattaaatacttggcgatgtccatcacataatcatcacgccggcagacggcgatattcggcattcttgtcatgataatatgaaccggtattgaggcaagttcctgctggccgatgctcgcccgcagcaaatctttgcgtgacagcacaccgactaagacagcatcacgatctacgacaaataacgtgccgacatcttctaaaaacatggtgcagatggcatcgtataccgagacattttcattgatgacaacagggatcgattgaaaatctttcacttgcagctttttcaatttatccgcaagcagctgatttcccgttttccccgtataaaaataaccgacccgcggacgggcctctaagaagcctgacatggtgagtatggccaagtccggccgcagcgtggccctcgttaaattgagctgttctgcgatatgctctccggtaatcgggccgttttcctttacaatctgtaaaatttgttcttgccgtttatttaattcgatcgtactcaccacctttatggaagggtttctttatctatgttttcattctgtgatgtttatgtaaaaggggaaaagacgattgccgatcacacagcaaccgtctttttctttattttacaataagatgattcatattagcaaaagacttgatcacatctgcaagagcggtcatttgcgctaaacggttggtttttaatgcttcatcgtccgcatttaccatcgtgtgattaaagtaatcttcgatcggctcttttaatccgctgagcacggcaagcgcctgttcatagtttttggaggcaaagctttccgcgacactgtcttttgttttttcataagcgtcaaacagctttttctcctgttcattttcaaacagatccggcttgatatcgcggctctcgccttttttactgatggagataacccggccgagtgattcagccgtttctttaaagccgggtgtgccgaggtgcttctcaagcactcttgccttatgaacggctgcatacggctcaagctctgtgctgtccagaacggcatcaataacgtcatgacggatgtcttcagcgtttaatacgtatttcagacgctgtgtaaagaaatcaaggagctcattctctttttccgtttctgtcaacgacagcagttctttaaaagaaatgccccagttgcggtcgatcagaatggaaacaatgccgcttgcctgacggcgcaatccgtacggatcctgagaacctgtcggaattacgtcaatgctgaagaaggaagcaatcgtgtccagtttatcagctaacgccacgaccgcgccgataaaggttgaaggcacttctcccccggccgctctcggcatatagtgctcattgacagcggcagcgacggcatcatcttcaccgagcatgcgcgcatatttttctcccatcacgccttgaagctcagggaactcatagatcatatgtgtaaccaggtcaaatttagaaatctctgcggcgcgcttcacaagtttttgcgtctgttcatccgctttcaggcggacggcaagtttgcccgcaatggtgaccgctcttcttactttatctccaagggagccgagctcttcatggaaaacgatattttccaatttcttcacgttttcatcaatgttcagcttttggtcttctttgtagaagaacgcagcatctgaaagccttgctctcagcactttctcgtttccgcgggcaacattttcaattgcatggctgttcccgtttcgcaccgtaataaaatgaggaagcaaattcccgttttcatcttttaccgggaagtagcgctgatgctctttcattgttgtcacaagcacttcttcagggatagaaagaaactcggattcaaaagatccgtaaagcgccgtcggatattccaccagatggttgacttcgttcagcagatcctcatcgaccggaatgttccatttcttcttggccgcaagcgcatccagctggctttggatcatttgtttgcgttctttcgggtcagcaatgacgctttgttctttcagcagcttttcgtatgatgacggcgcatcaacagatacttcttggccgagaaagcggtgtccctgcgtgttccggcccgtcttgacatttgtgatttcaaacggaatgacgtcttttccaaagagggcggcaatccatttgatcggacggatatagcgcagatcctgcgtgccccagcgcatgtttttcggaaaatgcattccggcaatcaaattttccagttgcggtaaaagtgtcttcgtctcttgtcccgcctggaatttttgaacgaagacatattccgtgccgtttacatcttttatatacaggtcatccactccggcgccttggccttttgaaaatccgatagcggcttttgtccagtttccgtcagcatccagagcgatttttttcgcagggccttttgcttcttcctgaatatcagcctgtttttctgctacgtcttttatatatactgccagacgtctcggcgtattaaaaagtttcacttcgccgtgggcgatatttttttcagcaagccagccggtcagcttttcaccgagctgcaccatgctgtcatgtaaaaaccgcgccggcatttcctcgagtccgatctctaaaagcaagtcttgtttactcatgggaagagccctcctctttaagcattgggaaccctaatttttcccgttcttcataatacgtttttgccacttttctcgctaagttgcggacacggccgatataacccgtccgctctgtcaccgagatcgcgccttttgcatcaagcagattaaatgtgtgagagcatttcagcacataatcataggccggatgcacaagcccgttatccatttgtctgatcgcttctttttcataggtgctgaacaaatggaaaagcatatccacgtcagatgtttcaaaagtataaacggaatgctcatattcagccatcataaataaatctttcacagtaaatcctgacgtccattcaagatcaaagacgttttctttatcctgaatatatgacgcgagacgttcaataccatatgtgatctcaacggacaccggcttacattcaattccgcccacctgctggaaatatgtaaactgagtaatttccatcccgtcaagccatacttcccagccgagacctgcacagcctaaagacgggttttcccagttgtcttctacgaaacggatatcatgttcaagcgggtcaatgccgagcgcacgcaatgaatcaaggtaaagctcttgaatgttatcaggcgacggcttaataatgacttggaattggtgatgctgatagagcctgttcgggttttcaccgtaccgtccgtccgcaggccgtctggacggctcaacgtaagccactctccacggctccggcccgatgcttcgtaaaaatgtatacgggctcattgtgcctgcgcctttctccacatcatacgactgcatgagcacacagccttcattcgaccagtgcttctgcaaggttaaaatcatatcttgaatgttcatttcaagcacctccactttctccattcttttacaagtgcggcggcaaccaaaaaactcccgtctctatgcttgccggccgcaaacatagggacgagagttctcccgcggttccaccctagttgctgaggatgtgaatcactcagcctctttttaaagggttgctcgagaatgcctttcgttgcgcgctcatccttagcttacactgtcctaaggtcgcttgtatgagttggacgcaagtacttctttctgtcactgcaacatattttataataaatgatcatataaaaagatgggcagaatgtcaacttttgttttcatccaaaaggttcttcatgctttccatctggtctaaaaaccgttttgactttaaataaagtcctgaatattcctcgtaatacagatcaatgacctgtttaatttcgtttttggtttcctgttttaacgagacgctgccgagccttccgatatcaaagtaataaaaaagccttagcagccttgccgtttgcggcgaaatcggaactctgtacggatccttttcaaagcagcggtggcagataaaaccgttatctcttatcgaaaaatgaaacgtcccttccccgcttttgcagtggacacaatgattcagctccggatacagccccatgacgccgagcattttcatctgcacgatgaatgtgatcacgtccgggtcagtcccgtcattcagcctcttaaaggattcgagaatcaattcgaataaataggggttcggtttcttctcttccgttcctttgtcagtgagttcagcgataaaagcggcatacgccgtcaaaaataaatcttctctgatcgttctcatgctgagaatcatttcaccctgctggagcgtgccgagtccggatgttctttgcattaaaaatgacccgtacaaaaacggctggctgactgctgacagccggctggctgacttcctggcgccccttgccatgacgccgattttgccgtgttccctcgtcagcaatgtcacgattttattcgtctccccgtagtcattcgtacggagcacgattccttcacatttagtcagcatttccgcaccttccaacaacgggaggggccaagaggtttacaaaattggaaaatcaattcgggctagctcatcttccggttcttcgggtctttccaggttctctttttccagttctttaaaaagaaggtacgtatcaacacttcctgtttgagaaaatacgttccaggtaaaattcaacacaaaaaacccacctttcatcattaaactagcttgccaatccaaattcttacccttatcttgacctgatgtcctccttttcatgttaaacaaattttgctaacgaagccctgtttctgtgaggtaatcccacacatcaggcatgcgctttagatgaattaatattcatcctctttgaagccgaaatcacgcagctgagacattttattccgccagtccttctgcactttcacccataattcgaggtaaacgcgtgaacccagcagcgcttcaatatcagcccgcgctcttttgccgacttctttcagaagcgctccttttttcccgatgacgatgcctttttgagaatcccgctcaactacaatggtggcggcgacatggacggagccgttttcctgccctttaatggactcgatagcgacagcgatgctgtgcggcacttcttcccttgtcagatggagcaccttttccctgatcagttcagaaataatgaaccgctcgggatggtcagtcacctgatcgctcggatagaattgaggcccttccggtaaatacgcttcaacctgcgcgagaagggtttcgacgttgttcccttccaaagctgagatcggcacgatttctttaaacggatagcgcgcacggtactcatcaattaaaagaagcagctggtcagggtggatcttatcaattttgtttacgatcagaaagaccggcgtggacgtctgtccgagcttttcaatgataaactcgtcgccctttccgtacccttcttcggcgttgatcataaataacaccaagtcaacttctttcagcgtattctgcgccactttcatcataaagtcgccaagcttgtgcttcggtttgtgaatgcccggtgtatcaataaaaatagtctgcgacgtgccggttgtcagcaccccttggactttatttcttgtcgtctggggtttgtcgctcatgatggcgatcttttgaccgatgaccctgtttaaaaaggtagactttcctacgttcggtcttccgatgatagatacaaatcctgatttaaagctttcgttcgtcatgtaaatcctccgatgaaaatgcgcccggcaataattcttccgcagtcatttcttttatttgtccttgtaagttggtcagaataacaagcatatcctttgagcacagctcggaaattacttgtctgcaggctccgcacggcgaaaccggtcccggagtatccgcagccacggcgagcatcgcaaattccgtatccccctcggaaacagctttgaatatcgccgtgcgttcagcacagttgcacatgctgtatgccgcattttcaatgttgcagcctctgtacacttttccgtctttggtaagaagagcggctcccactctgaaatttgaatacggcacatacgctgtgtcccgtgcttttaatgcttctgcaatcaattcttgtctgttcatgtgtacttaattcctctcttacctttatcctgtatgataccgctgtcacttttattttacataattatgatcggtttttcacgcccatttttggcaatgtaaaataattgtaagaatcttctgctaacatatcttcggcaggaagatgagtaaaccaatgatacacgatatcacggcaaagacgcaaacggctccggcggccgcgtcctttgccgcttttgcgagcgggtgatactgatcagtaactaaatccacaacatgctctatcgccgtatttaaaagctccaaagcaagcatccctccgatcagcaccaaaacaacggcccattcggctgtgctcagcccggtgagaaaaccgcaaacgataacggcgcaggccgcggtaatatgaaattgaaaattccgctctgaccgcgccgttttccagattcccctccatgcatggacaaagctcttcaggaacctgctccactcgtttttatgatctcgtgagtccatactcatccagcaaatccttttgctttgaaaacatttcttcctcttcttcttttgtcatgtgatcatagccaagcaaatgcaaaaagccgtgcacggccagaaaaccgagctctctcataaacgaatggccgtactcttccgcctgctctttcgttctgtctgcgctgatgataatatctcctaaaacaggcggcatgtcggcgcctacgatttccacctcgtcttcgccttcttcttcaagcgcaaacgaaatgacgtcagtcggagtgtcttttccccggtagtctctgttgatttctctgatttcttcatttgtcacaatcgtgaccgatacttcagcctgatcctgaacgccttctttttccgccgcgaattggagcagcttctccacttcttggagcgcatcagctgagacgctgttcgtttcatcaacaatatctatgagtaaacccatttatttcaccttcttcgtagcctccggatattcaatccgggagtggaaaattccttttaaagtcgcacatagtgttttggcgatcgtatccagttctcggaacgtgagatcacattctgagaattgtccgtcctgaagcttatcggatataattccccgcaccagtttttcgatccgctcgggattgggattatgcatggaacggacggcggcttcaacgctgtcggccactgagataatagccgcttctttcgattgcggcttcggccccgggtagcggaactctttctctgtaatctggtcgcccttttctttcgctttataataaaagaattttaaaagggacgttccgtgatgctgctccgcgatatccacaagctctttcggaaacttatagcttctgagcatattcgcaccgtctgtcgtatgtgcgataatgatatttttactgagctgaggagacagcttgtcatgcggattatccatattcatctgattttcaataaaatattgcggacgtttcgttttgccgagatcgtgataatatgctccgacccgtgctaaaagaccgtttgcccctacggcttcacaagccgcttccgacagatttgccaccatgacgctgtgatgatatgtaccgggtgtttccgttaaaatctttcgaagcaggggatgattcggattagacagttcaatcagcctcatcgttgaaagaatgccgaatcccgtctcaaaaaacggcatcagaccgataatcaaaacggatgaagcaagtcccgagacgacccccatcagcatcagcgttccgatttcaacaggtgacagcgccgtattttgtattaataaaagcgacagcacgataatcatattaataaatgagacgaacagtcccgcctgcaatatttttgatctcgcattgtgtttccccaaaaacagaatgcctgaaatgctgctgattaaatagtaaatgccgatgacgtaattaaatgttcccgtcacaccctgattaaacatcatactgccgcagatcgccagaatgatgcttcccaaaatggcgagcctttcattgagcagcagcctgattaaaatcgcgccggcggcgatcggcacaagatagccgatattggtgtattcaatcttctgaaagagactgacgacttccataatgacgagaataagcgttgtaatgatagaaaacagcaaaagagatttatttttcagcttaagctcctgctgctgtttctcaaaatagtagacaagcgtggcgataaacagcccgatcatcagaagcagaccgctgatcggctttaacaggttggaattattcaaaagccccgtcagttcaagcttcctgtatacttcccggtcgatcaggtcattctcttccacgagaacctgtccctgtttgatctgtaccggctggacgctgtctgacgcttcctggcgtttttcatccgtcgctttcggatcaaatacgtaattcggaatgaccgcgtattttccgatttcagtcgcagccgctaaatattttgacggcacagaagcgcttttcagctcttttgcgaccttatccttcgcttcggcaagcttttcagaaggaatttcactgctcatcaccgtattcaccgcggtaatgacggaatccctcacaaatgagaaatcttcattgtttgcatggagaagcgatttaatggcatcttccgagacggattcattgacatcctgtgtcagcttgtttttcaccgatttgaccaatgatttttccgaaggtgactttttgtctttttccgcatcttttttcacttcgccgatgctgtcaaaaatggaagtgatcaggtcaagccggttgtcggtatagccttttttcagggtgtattgatcttccaccgcatcttcggccgcctgttttttcgattccgtcgcctgctgatcttccactgtggcgggcgcgtaaatcgtcttatcactgactgaaaacaaatccaaattaagtgattcaggttttacatgaataaagagcaaaccaaacatgatcgctgaaagcagcaggtacagcagcacatgggctgagcgggcatgtctgaaactgcggaaccgttcccgggcgcttttgcccttttccttctttttcaaaacaagaacctcctccctgaaacatcaggaacacatcatataaaaatgacccgataacgggagatcgggtcatttttgcattacttttgcttatcataagcttcaataatttttgcaacaagcggatgcctgaccacatctgtctggtcaagttcaatcacggagatgccgtttatgtccttcagcatatccttcgctactgcaagtcccgatgtgacgcctttcggcaggtcaatttggcttacgtcgcccgtaatgatcattttagagccaaaacccaatctcgtcaaaaacattttcatttgagcgggagtggtattctgggcttcatcaagaatcacatacgcgtcgtcaagcgtccgccctctcatataggcaagcggggcgatttcaataacccctctttccataagacgctccgtatggtcgcttccgagcacatcatggagcgcgtcatacagcgggcgcagataaggatctactttttcctttaaatctccgggcagaaagccgaggctctcgccggcttccacagcgggtcttgttaaaatgatttttttaatgtggccgttttttaaagcatgcaccgcttttacgaccgccaaataagttttgccggttcccgccggcccgatgccgaacaccatgtcgtttttcttcatcgccgccacatattctctttggccgagggttttgacacggatcggtttgccttttgccgttttcgttatttcctcttcatacatgctttcaaaatagtccagttcatctttttttgccattttcacggcatacagcacatcacgttccgaaatctcgatccccttgcgaattaaagtaaggagcgagcccaataatctgtcagcgatctcaaatgtttcatcattcccggaaacgtaaatggtttcaccgcgcgtgatgaggctaatgcccagatccttctccattaaatgtaaaaaggcatcttggctgccgaacaaagaaagtgcttcgtccgggcttttcagtttgtgattaatcgcaagtaaatgttctgccattctttagtctccctgaacaataggtgtggtttgaacgatatcttctataacttggtagagaataatcaactttactttaccattctcaacggattggtgcaaaactttttcactttccacctctccgctgccgtttaatcgcttttctacatcttgtcttcccattttgataccggcctgaaccgcttcgcctttcgtataagtccgcacggttgtttcactttctcttgtctgttcttgaacgtaagaaatcggaagcttcatccccagaaattgaaacgggtgcttttcttcctctgttttcggatgtttcagcggctcctcattaaattcaaagccccaaaaaggcacgccccatgatccgaaagacagcttgtgcttcgtccttactttacccgtatatagcgtaaatgatgtttcaagaggcacggttacttctgacttgtaccatgtttctccgtaaatttccgcttttgaggcgactttccgatcttcatttccgatcagtcctgagacgagaagctgtcctttgtcaacatgatcgttcacaaaagccatcggctgccccttttgcacgaacatccttttgatgaccgccttctttttggcaacgatatggcgggggctcacgtacttttcttttgtcggttcgtttttttcgaccactttcatatgaagggctgtcccgttcaattccacaccgacccacgtaatattatcaatgccgtttgttaatgatttttgaattttctccggcgtcatcattaaaaattgcaaacgtccttttttcacaccgatttcttcaaggtgctttaccatctgatgctcggtttcgggcttggcccctttaatatcaatgtcccaaatcatgttggacaaaagaaacaatataacgaaaaacatcacaaatcccgcagtgaagcccaggtttaattttgatttgagaagcagaaagggaagaccctttctttttgtaaagcttgctttgcattcatgttttctgatgactcttctgaaagcatgtacatcttgaagctgaatcatcagcagaacacagtcttgcttttttttcaccgcaaagatggcgattccgtttctcgtgcattcattcagcaaccgttcaatcccttttcctttgacttccatttggactttacccgaaaaaaatgacagccatttgtttttcacattatttccccccggctttatgaatcgacatatcgtacgtgatctatcgtgccttccaaaagaatttcttcaggaaggattgccttaatgaccaagttttttcctgatatgatacattgcccctgcttgagcatcagcctgacttcttcttcgctgaacagcaggaggcctctgtgattctctatgtagatatgaagtctgccgaccatcgtaatccgaggcagatccatcataacgtccgggggaatttccaatgctcttgtcagccatgcctttacacgattctttctttgccccataaaaaaagaaccccctttcatctcatatgtatgatttgaaaaggggttctaacactttattttttaccgatgctccgcatggtccggtgcggtttttttgcacggggcggacccaaaacctcactgaatataatgccttgaaccgcagtttctttatttattttgagggctgatttcttcagagacgcgtttcgtgcgcgttgagatgtcagcttatgttcaagcccgttaaacatctgctccgtctccgctaggcgcttttcagcttcccttcttttttgctcaaaagggttctcttctgaaacggcaggcaattcttccgcttccggcttatgctctttctgcggctgtttttgatcctgcttttttgtctgattttcggggcgtgtacccggcggccgtttttcatctttgtttttcttgccgaatattgccgatataatgccgatgacggcggcaatgacgagcggatttgtcagaatctcgtgcatatagcggctccctccttaatagagaggttattgttggtcttcatcttgctggtcattcgtcagcttgccgatagaatccctcatgtccgtatccgcgtcgatattttttatgttcatatagtccatgacgccgatgtttccttcacgcagcgcttctgccatcgcaagcggcacttcggcttctgcttccacgacttttgcacgcatttcttctacgcgagcgcgcatttcctgctcttgggcgaccgccatggcgcggcgctcttcggctttggcctgcgcaatgtttttgtctgcttctgcttgatccgtttgaagaatcgctccgatgtttttgccgatatcaacgtcggcgatgtcaatcgaaagaatttcaaaggcggtgcctgaatccagccctttgccaagtacggtctgcgaaatcatatcagggttttcaagcacttttttatgattacccgaggaaccgattgtcgagacaatcccttctccgacacgggcgacaaccgtctcttctcccgctcctccgacaaggcgctcgatattggctcttacggtgattctggcttttgcttttacttcaattccgtccatggcgacacccgcgataaacggtgtttcaatgaccttcggattgacgctcatctgcacggcttccaatacgtcacgcccggccaggtcaatggctgcgcagcgttcaaatgtcagctcaatattggcgcgctgtgccgcaatcagggcattgaccaccctgtcaacattaccaccggccagataatggctttcgagctgatttgttgttgcggataggccggctttgtgcgctttaattaacggattgacaacgcggcttggtatgacgcgccgcagcctcattccgaccaaagtgaaaatgctgattctgactcctgccgcaagcgccgaaatccatagcatcaccggtacaaaggtgaagaatatggctaacacgattatggcagctgcaactattgctaaaatcgccaaacttgacagttccatctaattcctcctcaaggttatcatctatatttctctcacgacaatgcgtgagccttccgctttcactactttcacctgtctgtctttttcagtgaatgatccttccgagacgacatccagacgttcatcatcaataatgacggtgcctgacggtctgagggctgtagcggtaatgccgactttccccaacagctccgtccggttctgatttgaaacataaccgctctccgtgcttgttgaatcagttaatattaattttttaaagaatttcattcgtttccccaacacccttgttaatatgataaaggctgtaatagacacagcaatggcgatcaagagagaaaccgccattacggtaaagctgcccgcagcgagaaagaggctcgcgatgacgcctgcaataccgataagaccgattatgcctccgggcagaaatatctctaaaaggataaaaaccaagcccgcgcaaaataagaatacgctgtcatagccggcgaatccggcagcgatatgcccggtgaaaaacagcagcatggccgtcagtccgacggcacccggtattccgaggcccggcgagaacaattcaatggtcaaaccaagcaaagcaagcgttaataagacggggacaacaaacggatttgtcagccatctgcccaatttgccgacaaaaccttcttttgcatggtgaacatccgctttgtcaaaaccgagctttgtatataaagcatcaaggtctgaaaccgtgccctccgaatatccgacttccttggctttttcagctgtcagtgtcagcagttttccctttggggcgcccgcttcctttgcattgatggcgggatctgccatggccagggcgtatttcggatttcggttgtttttaaccgctgcgtcctccatttctgcatgccacagtgattgagcctttttgtccgccgcgtttccttttccgtcgatgatggctgcggcacccatttttccgcccggcgccatatagatttcatctgcctgaagcgctatatacgctccggcagaaagcgcccgtttattaacgtaagcggtaacaggcacatccgcgcggccgatgatatccgcaatatccaaggctgattgaacggcgcctcccggtgtattgatgtcaagaataatgtgtgacgcgccggactccttcgcttctttgaaagaacgcgataaaaacgaggcgagcccctgttcgacatttttctcaaccgggatgacataaaccgatgggtgatcagctttcgcgttcaattgaacccctaataaagataatacaaataagcccaatagagcaacagcaattccgtttttttttcggaacaaggcaaatataccctccttcccgtttcgttcttctttatatacgtaacaaatgtactttagtttcatttttttatgtataaaaaaagacatctctctaggaaagatgtcttttttcttgtcaattaagataattgactgctgacaagtctgttaattacactgccgtcagctttaccttttactttaggcataatagcactcatcactttgcccatgtccgctttggagctcgcaccgacttcagcgatggtttcatttacaattgtctgcagctcttcttcagaaagctgcttcggtaaataaatttctaaaatgtccagctctttttgaactttatctactaaatctaaacgatcagcgtttgaaaattcatggagggagtctttacgttgcttaagttcacgagataggacagtaagttcctcatcctcggtcaaactgtctttcttaagcttaattgcttcgttttgaagtgaagctttcaccattcgaacgacagtcagtttgtctttctcacggcttttcatatacagcttcatatcttggttaagtcgctcaagaagactcataaatccaccctcttttagaatttgcgttttctagcagcttctgactttttcttgcgctttacgctaggtttttcataaaattcgcgctttcttgcttcttgcaaagtacctgtctttgatacactgcgtttgaagcgacgaagagcatcttcaagcgattcgttttttctaacgaccgtttttgacattctctttccctccctccgaatacaccaatcgactacctttaaaaagatacatatataaacatgtactttgacattataatataagccatcagtcaggtcaactaagcgagctcacttttccgtcatgaataaggctgcttgtctatataatgatggaaaggggtgtttcgtttgataatactgattctctttaccgcacttatcctggtttttttactcggaatgagcctgctcaggcagggcctgatcgcattaacgtattcaaaaattgagaaaagcctgctcttatttaccgaccaccctttgaaagcttttctcataagcatcgtattcaccggttttcttcagagcagctcagccttcatggtcattgtcatcggctttgtcagcgcaggcgctttatcttttaaacggaccattccgatgattctcggcacgaatgtcggctccacgtttacgacggagtttttagccataaagatggatgtgctcatttgggtgctttttatcggaggccttgtgtttatcctcatccgtaaatatccgttcaggcagatcggtataagcttcctcggtctcggcatcatctttttttgcatcacatgcttcagccggcttgccgttccgctgacagaaatgaaggcggggcggaggttttgcgccatgtgaatgattcgagctggtccgctctttttatcggcatgatattgacggcaatcattcattcaagctccgtctgcatcggcattttgatgagttttatgaacgaaggggtgatcggcattgaacaagcggtcagcgtcgttctgggatctaatatcgggacatgcgtcacggccgtcatggctgctgtttcaggcggttatgccgccagacagaccgccggtgctcacgtagtgtttaatattctcggcgtgctgctcgtctttcccttcctgtctgcatcagcaggtattacggagcgcctgtctgatgatcccgcgcagatgattgcgcatttcagcctgttatttaacgtagtcaccgccttattgtttctgccgttcacacatttgttttaccggctgattgacaggctgattcctccgaaaccgtaaaaaaaccgatgcgggaaggcaccggtttttttatctgttatgaagacatgcgcatgtttcgggtcatttcatcctcaacgacgcggacgaattgtccttcgttatacggatagcccgctttttgaattttgactttgacaagtttgccgattacatcttccgtgcctttgaagacgactttcatgtaattgtccgtatagccgacgaacatgccgtcctcatcagactctttaaacgcctcttccggaatgatttccagaacctctccttcataatcggaggcgtattctttggcaagctggtcagacagcgcaatcagcttatgcacccgttcgtttttcacgttttcgtcaacctggtcttccattctggccgcaggtgttccggtgcgtttgctgtaagggaatacgtgaagctctgaaaacttatgttctttaatgaaccggtatgtttccataaattcttcttccgtttcacccgggaaaccgacgatgacatcagatgtgacggcaagacccggcagcgcttctttcagcttatttaaacggtccgcgaaaaattccatcgtatatttgcgtctcatccgtttcagaacggtgtttgatcctgactgaatcgggatatgaaggtggcggacgattttatcagacgcatccagcacttcaatcacttcatcagtgatttgacttgcttcaatagatgaaattctgatccgcttcagtccttctacacgtgtatcaagctcgcggagaagcttggcgaaattataatctttcatatcttcgccgtagccgcccgtatgaatccccgtcaggacgatttctttatagccggcatccaccagctgctgcgcctgtttaatgacttcttccggatcgcgggaacgaagcaggccgcgcgcccaagggataatgcagaacgtacagaagttgttgcagccctcttggatttttaacgacgctcttgtgcggtcagtaaaagcgggaacatccagctcttcaaacacgcgtgctttcataatattgccgacgccgttgatcggctgacgctcttccctgtactgctcaatgtaaccgagcattttttcacgatcctgcgtgccgacgacgatgtcaacacccgggatggccataatttctgccggagaggtttgcgcatagcaccctgttacgcagatgacgccgtcaggattttggcggatcgcccgtctgatgacttgacggctttttttatctcccgtgtttgttaccgtacatgtattaatgacatatacatctgctgtctgttcgaattcttttcgttcataacccgcatctttaaacagctgccagattgcttctgtttcataatgattgaccttgcagccaagggtatgaaaagcaacagttgccattactgatcacctcttaataactctgtatgataggaaactgcgcttaacgcgtaaagaggcgcagtttcagtccgtaaaattctcggtccgaggccgcataagacggcgcctttttctgaaagctgatgaacttcagactcagtcagaccgccttcagggccgaatacgattaaaagagacgaaccttgcggaaggcttttaagctccgcggcgaaagcgcccgtttctccctgctttgatgactcctcgtatgcaacgacacatttatcgacattctccgccatttcaagcagctgccggaacgtatgaacggttttcacttcgggaatttcattgcggtacgattgctccgccgcttccttcgcgattttcgcccatctctcccgctttttctttgcctttttgtcgtctagcttaacgacggatctggcgccctgaaaggggatgaacatactagcccccagctcggtccctttttggataatccattcaagcttatcgcctttcggaaggccgctggcaatcctgatttttaacggcagttcacggttttcacccgtccattcagcaatgctgcatgatatatgatctttagaaaccgctttgagcaggcataacgcttcatggccgtctttcgaacagcagattatccggtctcccgcactcattctcatgacgttcgctatatggtggacgtcttcccccgtaatttgaaaatcgggagtttcgtccatctcctgcttcgtgagctcgataaaatatcgttgcatacgctgtgacacctactaactgttattttttcgcgatgatgctgacccaatcttccatagacagaatttctgtgatggtaaagccggctttttccaacgcttcttttacttcctgttttttctggccgataatgcctgaagtaataaaatggcctccgtctttgagcaggtcatacgcctgtgatgtaaagcggagaatcacttccgccagaatatttgcgacaatgacatcatgttcgcccgtgatgccgtctaacaaattgttctgcttcacttcggccgtatcactcactttgttcaattttagattcagacgcgcgctttcaacagcgaccggatcaaggtcatacgcatgaaccgattcggcctcaagcatggcggccgcgatgcttaaaattcctgaaccggtgccgacatcaatgacacggtcgcctttttgaacgatacgctcaagcgcctgaatgcacagaacggttgtcggatgcgttcccgttccgaatgccatgcccggatccatttcgataatcagttcatcggtattcacgggtgtgtacgtttcccatgtgggtacgatcgtgaatttttcagaaattttcaccggatgataatactttttccaagctgtcgcccattcttcttcattaacttcagaaatggtgattgtgtttctgcctaaatcaatgtcgtacaaaagcagattatttatcgtctctttaatgccgtccaccgtttcgccgaggaaactgttaatcggcagatacgctttgacaatgacaccctcatcggggtaatcattggggtcgagctggtagatttccccgtaaacattctcacgctctttcattaaatcaagcggatcttcgatgacaaccccgctcgcaccagcttcatgcaaaatatttgagatgggttcgaccgcttcatgtgttgtgtgaatgctgatttcggaccatttcaaaactaccaactcctatccaatcattactcgcctttaaatgcgcgttttactttgtcaaagaaactcatttcttgttcatccggcaggtttccgctgacttcagcgaactcgcggatgatgtctttttgtttgtctgtcagattcgtcggtgtgacgacgcggacgacaatgtgctggtcgccttgtccgtagccccggacgttctgaacgcctttgcctcttaatctgaatttcgtgccggtttgtgtgccggcaggtattttcaatttcacttttccgtgaagcgtcggcacttccacttcgtctccgagtgccgcttgggcaaacgttaacggcatttcgcaataaatatcgtctccgtcgcgttcaaagaactcgtgggcgcgcacatggaatacgacaaacagatctcccgcaggccctccgtttacgccaggttcaccttgacccggaacgcgcagctgctgtccgtcatccacaccggcaggaatcgtgacattgatttttttccgttttttcactttgcccgtgccgccgcagtcagaacacttgtttttgatgatttttcctgttccttcacagtggtggcagactcttcggttaaccactttgccaaacggcgtgttctgttcgacgttcagctggcctgaacctccgcagtgcgagcacgtatccggctttgttcccggctttgcgcccgatcctttacatgtttcgcaattctcttcgcgcggaatttcaatgatcgtttcttttccgaaagccgcgtcttcaaatgacagggtcattgtatactgcagatccgcgccttgccgcggcgcattcgggtcacggcgtctcgtgccgcctccgaagatgcttgagaatatgtcatcgaaaccgaagccgccgaagtctccgccgcctccgaaaccgccgccgaatccctggttagggtctgtatggccgaattggtcatattgagcgcgtttttggtcgtctgagagcgcttcgtacgcttcttttacctctttgaatttttcatctgctccggattctttattgatatcaggatgatatttttttgaaagcttccgataggcttttttgatttcatcctttgaagcgctcttacttaccccaagcacttcatagtaatcacgcttactcatctcgcttcactctcccgaatttctcacataaattagattgtatcattttgaattatgttttttcaattccttttatcccgggcaagaaaaaaagtcaaagccaagagatgcctgactttgactttctgtctgttgaatcagaatatgctgtgtgttcttccgcctaaagccatgcgggaaagaacttattttttcgtttcgtcgtcttttacttcttcgtattccgcatcgacaacgttgtcgtccgcttttttgccttcagcgtttgctgcgccttcagcctgctgcgcttttgccgcttcttcataaagcttcatagaaagctcttgaacgattgtttgaagctcatcttttttcgctttgatgtcttcaatttcgtttttctcgatagcggctttcagcgcgtctttcgcgtcgtttgcttttttcacttgctcttcgtccactttgccttccagatcttttaatgtcttttccgtttggaacacaagctggtcagcttcgttgcggacttcgatttcttcttttctcttcgcatcagcgtcagcgttttcttccgcttcttttaccatgcgttcgatctcatcatcagaaagacctgaagaagatttgattgtaatgttttgttcttttcctgtgcctaagtctttcgctcttacgtttacgataccgtttttgtcaatatcgaaagaaacttcgatttgcggtacgccgcgcggtgcaggcgggatatcagtaagctggaagcggccgagcgttttgttgtccgcagacatcgggcgctcaccttgaagcacgtgaatgtcaacagccgtttggttgtcagctgcagttgagaatacttgagacttgctcgtcggaattgtcgtgttgcggtcgatcagtttcgtgaacacgccgcccattgtttcaataccgagagaaagcggtgtaacgtcaagaagaacaacgtcttttacgtctcccgtgatgacgccgccttgaatcgctgcacccagcgctacaacttcatcagggtttacgcctttatgcgcttctttacccgtttcttttttgattgcttcctgtacggcaggaatacgtgttgatccgccgacaaggataactttgtcgatttcgctcgcagaaagatccgcatcttgaagagcctgacggacaggagccattgtgcgctcaacaaggtgagcggaaagctcttcgaatttagcgcgggtcagtgtcagctcaaggtgaagaggacctgcttctcccgctgtgataaacggtaaagaaatttgtgtagatgatacgccggaaagatcttttttcgctttctcagccgcatctttcaaacgctgaagcgccattttgtcttttgaaagatcaatgccgttttcttttttgaattctgctacgagatgatcgatgatgacttggtcaaagtcgtccccgccaagacggttgtcaccggcagttgaacggacttcaaacacgccgtcgccaagttcaagaacagatacgtcaaacgtaccgccgccaaggtcgtaaacaagaatcgtttggtcttcgtccgttttatcaagtccgtatgcaagcgctgctgcagtcggttcgttgataatacgctctacttcaagaccggcgattttaccggcatcttttgtcgcttggcgctctgcatcgttgaagtatgcaggaaccgtgataacggcttttgaaactgtttcgccgaggtagctttcagcgtatgctttcagatgctgaaggataatagctgacacttcttgaggcgtgtagtcttttccttcgatttccactttatagtcagtacccatatggcgtttgacagacatgattgtgttaggatttgtgattgattggcgtttcgccacttcccctacttggcgctcgccgtttttaaatgcaacgactgacggagtcgtacggtttccttcagcgttggcgataactgtaggctctccgccttcaagcactgccacacatgagtttgtcgtacccaagtcaattccgattactttactcactttgaattacctcctgctatgtagttattgattcacttttaccattgaaggacggatgacgcgatccttcagtttgtagcctttttgcagttcttcgataacaatattgctgccgaagttttcatcctccacctgcatgacggcttggtgaaggttcggatcaaattcctgaccgacagcttcgatggcttcaacaccttctttttcaagtgcgtccatcagctggcggcggaccatttccataccttgcagcaagctttttgtctgctcgctttcagcttctacctgtaacgcccgttcaaagttgtcgagagccggaaggatttccgttacgacgttttgagaacggtatttctgagcagcttccatttcaaggcggctgcgtcgtttatagttttcaaagtctgcttgaacacgcaaaagcttgttttctttttcatcaagcaaaccctgcaattcatcaatttggtgctgaagggcttcttcctgacctgccgtttcttcatgctgctcttgtgaagccgcttgttctgcctgttctgtcacttcttcttgttctgctgcttcaacctgttctgcggtttgtttttcttctgacattgtgttcacctccctcaaatgctgtaaaaagatgactgaaaatgattgccaaaattcccttattcatcatacaaacttgtgaatgcttttgacaagtccgaagtcacgtgctgcagcaggctgacgactcttgaataattcatgcgcgtcggcccgataatcgcgattgatccgatctgcttcgtatcaactgtataggtggccgtgattaagctgcagttttccatttcttcgtagtcgttttctttcccgattttgattgaaatcccggcttttgatgactgaaacagcttcagaacatcctgctctttttcaattaaagataagagcgagcggaccctttcaatatcgtggaactccggctgattcagcatgttgatctttccgccgaaaaacaatttctcaacgtgggccgccggatggaatgtggagcggagcgattcaagtatgctgtcatagttggcgatatgctgccttaaatatgtgacaacctctttaaaaatgcgctcattcagttcgtccatcggcacgcccgctaatcgatcgtttaatatattgaccagtttttcaatatcggccaaatccactttagccgggaaattgatggtgcggttttcgacatgccccgtgttcgtgacgaggatggcgaccgccttatccggctggatcggaacgatttgaatctgtttaagatagttctcgctcagcgtcggcccgaggacaatcgatgtgtagtttgtcaggtcggacaggatttgcgctgatttttggactgttttttccagctcgaagattttttctttaaatatcgagtgaattaaatccagatcggtttttgtcagcttgacgggtgacagcaaatgatcgacataatacctgtaccctttttccgacggaatccgtcctgaggatgaatgggttttttcaataaagcccaattcctccaagtcagccatctcgtttctgatcgttgcagagctgaatgtaatctcgtctttttttgaaagagttcttgatcctacaggctgcgctgattgtataaaatcattaataatcacttgcaggatcaacagctgacgatttgttaacatcatcatcacccctgttagcactcaaggtcagcgagtgctaattctatatcaaaagtaacaaaccaaaagaaaaatgtcaattataactcacccaaaaaagcgccaaaaacctcatttcctaataatttgccctcatgcgttaatgcaaccgattcttccgtgtcacagatcaggcctttttcggttaaatctttgagaacatcgggaaacagttcgtcgaccgagcgtccgaatttatcgagaaaagcttgcttttgtacgccggacatttttctgagaccgaggaacatttcttcttcaatctgctcctcccgtgtcacctcgtgcgtgtcacggtaaggcagtcccttttcttcgatgagctgaatgtaatgtttcacaggcccggcgttgacggtgcgcgtgccgctgatatacccgtgagcgcctgcgccaaaaccgaaatacgcttcattgctccaatacgtcagattatgctgcgactcgtatccgggctttgcaaagttgctgatttcatattgacggatgcccgcttcactcatctgcctcatgaccgtttcatacatctcggcctcttgttcttgcgccgggagatgcaggcggcctttttgcattaaattataaaacaccgttttcggctctacgatcagcgagtaaacggaatagtgctccgcatcaagagacaaagccgttttgacggaattgtcaagatcggccagcgtctgacccggcaggccgaacatcaaatcgagactgatgttgtcaaagccgagagccctcgcacgttcaaaggaagtgaatacgtccttttgtttatgcactctgccgattttttgtaaaagctcaccttcaaaggtttgaacaccgaagctcagccgattgacaccggcatttttcatgatttttaatttttccggggacaaatcatccggattcgcttccgcggcaaattctacgagtccgtcagaaggctccagcacgcggtgaatggaatccatcaatttttccagctgggcgggtgagagcgatgtcggcgtgcctcccccgatgaaaatcgtgcggagatcagggcgtcccgtccgttctattgtatttatcatttccttttcgagtgagtttaagtacttatcgacaggctggctctgaataaaatatttattgaaatcgcaatagtggcagatatgctcacaaaacggaatatgaatataagctgatttcattttgaaacaccttcttctttacagaaagaagccgcagcgcgggactgcggcggcttccgttattttttcgggctgtcatccattttaagaacggccataaacgcttcctgcggcacttctaccgagccgacctgcttcatccggcgttttccttctttttgtttttcaagaagcttccgtttccgcgagatgtctcctccgtaacattttgcaaggacgtttttccgcatggccttaatggttgagcgggccacgattttctgtccgatcgctgcctgcacgggcacttcgaattgctggcgggggatcaattctttcaatttttcgacgatgactttcccgcgctcgtatgcgtaatcgcggtgcacgataaacgacagcgcatcaattttttctgcattcagcataatgtccattttgacgagtttggacggtttgtagccgatcagctcgtaatcgaaagaggcgtaccctttcgtgctggatttcagctgatcaaaaaattcatatacgatttccgcaagaggcatctcatatacaatgctgactcggttggcgtctaagtactgcatatcgataaagttgccccgtttcccctgacaaagctccataaccgctccgacgtaatcgttcggtaccatcatcgtcgctttgacataaggttcttccacccgctctattttctgcgggtcaggcatgtttgacgggttatccacgatgatcttttcgccgtccgtcatataaacgtcataaataacgctcggcgcggtcgtaataaggtcaattttaaattcccgttcaatccgctcttgaatgatttccatgtgaagcattcctaaaaagccgcagcggaaaccgaagccgagggcttgtgacgtctctgcctcgtattgaagagatgaatcgttcaattcaagtttttccagagcttcgcgcaaatcattatatttggctgtgtcaatcggataaagtccgcagtataccatcggattgagtttgcggtagcccggaagcgcttctgccgcaggcttaaccgcgctcgtgatcgtatcaccgacacgggtgtcgccgacgtttttgattgcggctgtcaaatagcctacgtcaccgactgtcaattcgtcagccggctgcgctttcggcgtgaagacgccgacttcgatgacttcaaactcttttccggttgccatcattttaattttctggcccggtttgaccgttccttctacgactctgatatacgcgacgactccgcggtacgcgtcataaagcgagtcaaagatgagcgctttcagcggagcttccggatctcccgcgggagccggcactttttctacgatctgttctaaaatgtcttcgatgccgatgcccgctttcgctgaagcgaggacggcgtctgaagcgtcaaggccgataacgtcctcaacctcttgacgcacacgttctggctctgcgctcggaagatcgattttattaatgacaggaagaatctcaagatcattatcaagcgccagatagacgttcgccaatgtctgcgcttctattccctgagccgcatcaacaacgagaatcgcgccttcacaggcagccaggcttcgcgaaacttcatatgtaaagtcgacgtgtccgggcgtgtcgatgagatggaatatatattcttctccgtcttttgctttgtatttcagctgaacggaatttaatttgatggtaattccccgttcgcgttcaaggtccattgaatcaagcaattgttctttcatttcccgctgggtgatcgccgatgttttttctaaaatccgatccgccaaggtcgatttgccgtggtctatgtgggcgatgatggagaaattccggattcttgactgcctctctaaacgcttttctttatctgtcacaatctatcactcctactattaaacgcaaaatacactagcttagattatatcaataggattgtaaacattcaattaaaacaagaaagagaaaagcttcctttaaggaatcatccgcttttctcttcatcaatgctaacggttcagtttcgaaacccactcatacatcgcctgtgccgagtccgtcacggtatttgaaagggtttctccggcttttgaaaacaggttgaaggtttctgcctgttccagctgtttttgtttttcttccagatctttcgccgtaacggtttgccccaaaatggaagcttctttttcctgtccttctccgccgccgagcgtgaatgctccttttaaggagggatctttgtatcctttcatatcaagcattccgctgtttgcctgctgcatgccgaacaatacgccgacaaacatgacaatggcgatcagcaggcatttgccggtaaaacggatcatttgcatcacctgatttctattgttttttcttctctcctgattgcgagctgaccttgtctgcatcccagtacagttcgctgaatacatcggccacggcatctgatgcgcgcctcagttcttcaagattgttatccacgccccgaattccagcagaagcgaccgatcgtttaaatcctggttgtacactccattatctcccggagagccttttgataaaacaccgacgcttaagcctgggtattttttctccatcagcttatgaagttcacttgcgagtttatagttttcttcaaaattagcgctttttttgccgacgacgatggcgaccctggcatagctttttcctttgatgtcggctgtcgtatttttcttgcggcgggaatcccggtgaatgtctatggtatattgcaggtttttatttttggcgagcgcgctttttacgaccggccttgattcgtcgtagcttcgcgcataatttaaaccgtctttgttcaggcgggcctgaatgtcggttttatctacggtcgctcctacaccttgcgcttcaagcgcttttccgaacatatctccgacaagcgtgacattggccttcgaatggcgggcgttatccggatttgtttccccttttaacagaggaagataggattcggtattatgagtgtggtaaataaaaacgacttttttgctgcctgttgaatgtttcggcggcgccttttcttcttttttcgttttgttttcgatttctgccaggttcacttctttttctttttccatcacctttgacggcggcggggattcagcaggcatattcgtataatcagtcccctgccccgccagaaggatctccgtatcgtattgggcaaatcccggcagctcacgtcccaagaaactccgcgggtcttccatattaatgcttgtcgccagttttaaggaaagccgggacagctgaaaagagtctttttcaggaagctctgaggcgaaataatgattttccataccgaggaggtgtgcaaacgcgtcacccggaagttctccggcaattccgtgaagagaattcgaagaaagcctcagttcagggcgaagcgatgtgagcacacccgataatacgaaaataacgataaggcttgtcataaacaaaaacatgcccttgagcgcatttccaccgtttactgcaacgacaatttgacggtttctgcgtttttttctcatgatttgaatccctccagcgcttgtctagtaattactctatgaacaagctagaggaggtagaaccattttaatgattataagaacctttgttatcttgtgacactttttcatgaagggcggtgtttaacccgtttgcaagcacgttcgccatatcatcaataaaggtgtcaatctccttcggtgtgaccatcagattatggccgagcggagagagcacttcgtgaatcagctggcgtttttcgttttcgtccagtgtgccgacaataccgagaaaggattggcgttctttttctccgggaaggtcttcgtctgtcagcaccttctttttgccgaagttcattccggcgggcaccagagatcttgacgggctgtcatctttcatctctctgccgaaatgctttaatatataatccaccgtatcgctcgcgatcgtaaccgcatcaacgacagtcggtaccccgattgcgatgacggggatgccgagcgtttccttgcttaattcttttcttttattgccgacgcctgatcccgggtgaatgcccgtatcagaaaattggatggtcgtgttcaccctttcaacggctcttgccgcaagagcatctaccgcaatcacaaaatccggctttgattctttgatcacaccttgaataatatcgctcgtttcaattcccgttaatcccatcacaccgggagcaagcgcgctgaccggcctgtacccttcctgcacgttttccggctgaagcctgaacagatgccttgtcacaagaaggttttcggtcacgagagggccgagcgcatccggcgtcacattccagttgccgagaccgacgatcaaacagcttgcatcctttggaatctttaatgccgacagataggcggaaaattcctcggcaaacacttccgttactttttcctgcatgtcagagtcgtgttcccgaaccccttgagcctcgatcgtgacatagcgtccctgctttttccccgatagctcggcgccttctttggtaatatcgacggttctgactttaatgccgcccttgtcgcgttctttttcaataaacccgtttatttcttttgtctgaccggcttgtccgtcttttaccgcctgtttcgtttctaccgctaaatccgtccgtatcagaaattgattgacatccagttcgttgtttttcacaggaaagacctccttcaatcatcgtggtacatagtgtggccatttacaaaacgaatcatgcgaatttacccatcaacgaaaaatactttacatttatattgcaatctaaagttctgtttgatagaatacaatttgttctattgtgaagaagatttaaccttaagacactgtgctacaggttgtatcttaggaggtgaaacacatgccaaacattaaatcagcgattaaacgtacaaaaacaaacaacgaacgccgcgctcataacgcgacaatcaaatctgctatgcgtactgcaatcaaacaagttgaagcttctgttgctaacaacgaagcggataaagcgaaaactgctctttctgaagcagcgaaacgcattgataaagcagtgaaaacaggtcttgtacacaaaaatgccgcagctcgatacaaatctagacttgcgaaacaagtgaacggactttctgcataatacaaaaacgatccctttaacggggatcgtttttttcattcagtccggagaagctcaaggagaaagagctccagcaagagctgcttgtcctttttccccgttttcatttcataatccattactgcgagcctttctataatacgccgcagctcttcttcagaaaatagcctcgcctgatccatcgccagctttacccggaaggggtgcacctttaagttggaagcgatttgcttttggccgtatccttgtcccgcaaaatactttgtctgcataatcagacggaattggttggcgatcagcgccataattttgatcggttcttcgttttgttttaaaagatcataaaatatttgaagactttccgtccgttttcggttcacgattttgttgatcagctcaaaaatattctgctccaaacttcttgcgacaagctcccggacatcttcaagcgtgatctcatgtctgtcaccggtgtaggcggagagtttttgtatttcctgatatatggaagacagatggccgtttgcaagcagaaccaaatgctcggcagcttctgtatccatcgttttattttcggatttcgccagattaatcgtaaaatcagtcgtctcctttgcattcagctccttagcttcaatcataagggctttttgcttcagcgctttcgtcagctttttccgttcgtccagcttttcatacggagccacaatcacaaagaccgtataaggcgcaggctccttcaggtaagtctccaaagcgcttgtattatgctctattttttctttctttttttcccctgttaaaaaagacggattttttacgataaccagccgcttctctcccataaacggaaacgtttccgcatcggttatggcctggtcaagcggatcctcttcaagatcaaaaacagacaggttaaaatctttagtctcctcatcaacgacagcttgtctgatccggctgacagtctcttggagcagatacgtttcttttccgtataagcaataaacggagcggacatccccttttttcagggctttccaaacatcaaataccatgatcgtatgacttcctctctttcttgatccccttctatcctaaattgagttcggcaaatagtaaagaggaagctttaaaaaggacagcttcctcatttataataaacgcctgattcacaagctcccgggtctgcttgtaaaaaggcgataatcacaagaacagaaaacgttaccatcacttctagatttttcaaaacaattccagtatacttagggaagtcaggagggatgaaattgaatgattttgaaaaaaacgttcaaagcaaacgaaatgatgctgttgactcagctgtcggttttgtcgtgtccttcggatttttcgcctttttgttcgtgatggcaacagccatccatcttatcggctcttagccgcattccgggctgctgtcaatcggcagtcttttttacttcttgcgccctggtttcttctatatcatatggagggaagacggaaaacgttccggcgcctttttcaaatctgtattgaatcgttccgctgatatcggtgcgaagcacattgacagagtacgccttcaaacgatccagcacttcttcgtgcggatgatggtatcgattctcttttcctgctgaaatcagcgctgcttccggctgaagctgtttcaaaaaggcttcactcgttgagcttttgctgccgtgatgacccgccttcaatatatcagccttcagtttcggatacgttttcagcacttctgtttcgccgtccgattctaaatctcccgtcaaaagccagctcactccgcctaaaaccgtccaaagcaccagtgacgaatcatttttactctttccgtcagacgactccggagacagcacctgaaactgaagatcaccggctgtaatggtgtcgccccgctttgcttcggcaacgggaatgttgttttctttcgccatatttaatatgttctgatccttcggttcttttacgaatcccacggggacaattaaccgtttgactctatgatttttgattaacactccggcttccccgatgtgatcctgatccgcatgggttaaaatcagcgcatccagctttttcaccccttttccgtttaaaaacggaatcaaaaccttctcgccgatagaatacgggtggcgtttttctttccatgattctccgggataagcaatcactccccctgtatcaaccattacggtccctttgcggtgcggcgcgtttataaacagcgagtctccctgcccgatatcaagcatatccgcttctccccatgggctgaaatacggacggcatattaaataagccaaaaccgcgcagaaaaaaagagccgatttcctgagttttaaaaaacctcccttttctaaagccgcaaaaagcgtaaaaacggaaaccgcaagcagaagaagggaaagaaagtcaggctttaacacaatcatagtaaataaatcaacggatgccgcatatgtaatgaaatcatgcacaggcttcatcacaaggtcaaacatattaaacaaacattctcccatctgccttgaaagtaaaagaagaaggaaaccgatgacagaaaccggaatgacaaataacgtataaaatggcaccatcaccatattcatcggaaaactggcaagtgaaatttgctgaaaatgatagagaagaaacggaagtgagctgagctctgcaatgaatgaagccatcgcaagcccggcaagtctgcttttccctgctttctttaaaatggaggatgacagaattaaagaggcgcttaccgcaaaggaaagctggaagcccgcctgccaaaggaggtaaggattaaacagcaggagcagcagataagacagagacaatgcagcagaggaatgaatgccgcgtttaacaagagttccggcgatataaaatcccagcatgagggatgcgcgcaatacggatgggcggcaccgctcagcagcgtatacaccggtaaaaacagcagcagcaatatccccgccttttctcttgtcagcccgattctgatcagagcataaaataatcccgccgttataagaccgacatgcattccggaaatcgccattaaatgaacgactcccaaattttgatatgcactcagtatatcgtcttctatagaaaatctttcacctaaggtcagcgcttcaacaattccggcggaagattcaggcacgtgattccgaatgatcgaaatcaaattttttctgatgctcagcagtttaaacagcggctgtttggatttttcacactgctgaatggaagtcacggtaaataaccagtgaatctgctgagagtaaagatattccttataatcaaaacccccgggaatcgtcgcatgtgcaggctgttccagagagcctgtaaatgtgcagcgcatccccggttcaagctgttcaatgcgtctcttttcttcaagagaccggattttgtacgaagccgcccatttttccttgtcatgtgtacggataacggctgacattttcgctccgtcaaccttcggaatattagtgatgacggcctgttcagtataactgccggcctgataccgcgttacattcacagcgtcacaaaccgtataaagaaagaaataaacacaaaaagaaacgaggcagatgataaccggagcaggctgctttgtttttatcataataaagagaagatacagaagaaaaaggagcagaacccagaagacatgagcggcggcaatccccgcagttgcagaaaccgccgccagaggcagaagaaggtatttatatttcatttatacgtaactggtaaacagctcattggcctgttcatgaatttttttcagttcatctgccttaactcccgcatcagataattgctgaatcagacctgcgacaaaagacaatttttcgcggtttttcagatcgatgatcatttcatcaagttcgacctgctccaccttgactccggcttggctgaacagctcttttgcataaggctgtgttttgtaatcttcggcataatagaccgttttgatgcctgcctggataattgatttgcagcattgaatacaaggataatgcgtcacataaatttccgcgccctccgtcggaacaccgaacttagaacattgcagaatcgcattcatctctgcatgtatggtcctctggcaatgattatctattaaaaggcatccttcatcagcgcaatggacgccgccggcgattgagccgttgtatccgccagcaatcatccgcttatctctgactacggttgccccgactgacagtctcggacatgtgcttctcagcgccagcaaatggctttgcgccataaaatattgattccatgagattcgttccacaagtgttccctccaaaaagtcttgttgcttttctaagtttacatagatttaagcagaaccgtcaattcactttaccgtaatggaagtttttatccgctcaaatgacttttctccaaagcctgatacattcatcaaatcttcagcagtctgaaaccgtccgttttcttctcggtaggcgataatagcttccgcttttttctgccccaccccggaaatcgcctgaagttcgtccagagatgccgtattgatattgacagctgcattctccttttcaccaactgctgttttcgggcgattctcctcttcgccttcactcggaatataaacaatcgtcccgtcctgcagctgctctgctaaattaacattcaattcatccgcctttttcttcaggccgccggctttttcaatggcttgcgtcactctgtctcccgctttcatttcatacacgccgggatttcggaccgctcctttcacatcaatcataatcttatcgtctgcggtgtcttttttgtccgcgacggatgcggaggctgtttgaccgagcacggactgctgtttgaccggctcttccttttcagaacgaaacagccaaatacagataaaaaccgcacctgccgcaagacaagcgcccagaattttcaggttccgccgcatccgctccgtcatcatcgctttcgtcatattgcattgcctccccgcataaggtttagaggattaagggaaaaaggaggggaattcattgaaaataggctttatcggcaccggaaacatgggaacgatcctgattgaatcgtttatcgaatcaaacgctgccgatccctcacatatcaccatcacaaacagaacaatcgaaaaagcattaaaactaaaagaacgtttcagcggcatccacgtcaccgaggatcaggaaaagctcgtacaggataatgaaatcatattcatttgtgtaaaaccgctggatatatatcctttgctgaaaaaactcacaccgcatttacggaaagatcacattttaatctccattaccagccccgttcagacggatcagattgaacatacggttccgtgtcagacggcccgcgtcattccgagcattacgaaccgcgccttggccggcgtctcgcttgttacgttcggcaaaagctgcagcgagtctgcaaaagcggatattcaaacgctgttcactcatatttcaaaacctgtggaaatcagcagcggtattacaagagcggcgtcagacattgtcagctgcgggcccgcttttatgagttatctcgttcagcgctttattgacgcggcagtggaagaaacggacatcaccaaagaagaagccgtgattatgtcgacagaaatgcttgtcggtctcggaaagcttcttgaaacggggcattacacgcttcccgccttgcaggaaaaagtatgcgtaaaaggcggcgtcaccggagaaggactgaaggctctcgaaagcggtgttcaggatatgttcaatcgtgtctttcagcgtacacatgacaaatacgatgaagatatatcgttagtgaagaagcaatttcacgtgtaactgagtatgccataaagagctttatcacgccaatcgcaaaaaatgcattttaaaaaccatcgttccgtttaaacgatggtttttggtttgcctgccgtaaagaaaagacgttcagactctgttgaaggaggccggtctgtaaaatcagccgtcactttcttcaattcaaatccggtctctgcaagcatttgtttatattcttcaatgtaaaatgttttttgctcatgcgtctcgtcatagcggtcataagattgtccgttccatacgaaaaaggacatatcatggatgacagaaagctcttcatcgccggcaaagctttgccagatatagctgatctgctcatcctgatccgcatgggtgctgtccggaaaaagctccgtcattttatacggggaatggacgtcaaacagaagcaggccgccctccttcaaaacttgaaaaacacttttgaaggtgcttaagacatcatttttcgtttttaagtaatttagggaatcacagcagatgactacggcatcaaactgttcttcaaaaccggaaagctctctcatatcctgctggagaaaaagaatcggctttcctgtttttttctgctgggcacagctcagcatatcttcactcaaatcaatccccgtgacttcgcagcctttttcagcaagcctgatggatatttctccggttccgcaggcaagatcaagcacccttcccttttccggaagagacgcttcgatccagcccgcccattcatcatacggcgcatgggacattaactcgtcatatacaccggcgaagccttggtaaatcatgagttcaagccgagttcaagctctgcgagcggcgcgtcgccccatagcttttcaagattatagtagcttctttcatctttatggaaaacgtggacaatgacgtcgccgagatcaactaaaacccagcgggcctcatcaaacccttccatctttttgacatcaatgccgttttcttctgcctgatctttaatttcgcgcgcaatggcctgaacctgtttatcagaattcccgtggcagattaaaaagtaatccgctacaagtgagattccttccatgtccagcgctaaaatatcttctgcacgtttatcgtcgcatgcttttgccgcgatttttaatacggaagcttgattcattttccatattcctcctgtcgtttttgagacaccagccagttataggttgcaaacgtctccggaaagaccggctggttttttttcatcagaaatatcattgtatttttcatcgcttgtatgagcgcttcgttcagatctgtttccgccagacggcgcacctcttccactccgggaaaatggcggccgggttcaatgtaatccgcaacgtagatgactttgtctaaaagggtcattccgggacgccctgacgtgtgatagcggattgcatccaagacctcgggatcagtgatccccgcttctttctcagccaaatacgctcccacaggggcatgccacagctcggcattgtaatccaagagctcagcaggcattttttcccgcacgatgatctgcttcatttcttctttcggccggaatttcgcataatcatgaaaaatagccgccatttccgcttttttcggatctgctccgaaccggcctgcgagaataaccgccgtatctgtcacgccgattgtgtggatgtagcgatgctcggtcagctgttctttgacgcaggcaagtgcttcctcacgattcatataaatcattctcctctatatactgcctcactttatccggcattaagtattgcgtcggcttttttgctttgagacgttctctaagcatcgttgacgaaacgtcaaattccggaacgtcggcaaaaagcagcgggtacggggtctcgatatgataccctgggcgccgcactccgataaattgaatgagcgtgagcagttcgtccagtttgtaccatttcggcagatattcaatcatatccgccccgataataaagaaaagcttgtcgttcgggtgccgctccttcagtaaacggacggtatcataggtataagaagggcctttccggtccatttccgcaagctcaagcttaaagaaggaattagagctgatggcaagcttcagcatctccacccggtgccggctgtctgtaaagtcttcattctgcttatgcggcgggattttattgggcataaaccaaatctcatcgagctccgcctgatgaaggacttcattagccatcagaagatgtccgttgtgcggagggtcaaatgtgcccccgaatattccgattttcttcatgtcaaccaccttacggaagctcgatttgtttattttcctttgattccttatacaatacgatcgtatttccgatcgtctgcaccaattgtgagcggctgcctttcacaagcgcttctgcgacatcgtttttatcgtcttcgcagttttgaagcacgctgactttaatcagctctcttgcttctaaagcctctgcaatctgtttcaccatgttttcgttgactccgccttttcccacttgaaaaataggcgttaaatgatgcgcttttgaacgcaaaaaccgtttttgttttcctgttaacattgtgttcctcctagttttccttcaacaattgctctcattaagccgctgtcaggctcttgttccgtccacagcttgaaagacagtgcagcctgttccacaaacatgccgacaccgtcaagggttgttaaacctcttttttcagcttcttttaagaacgccgtttgaatcgggttgtatacgatatcacaaacgatggcgcccgttttggcccgttccaatgagagcggcacggcatccgttttcggatacatgccgacagatgttgtatgaataatgacgtcatattgttcaagctgattttcagcttcttttaaagtaagggcgcgtttctgctgaaaagagggagcagccgcaatcagactttccgctttttccggcgtgcggttgcaaacgtcaaattgtttcggctctctgcggacgatcgtcgtaaaaatcgctcttgccgcccctcccgccccaatcatgaggatggagagctctgatatcggtttgtccaatactttgactaaggatttataaaacccatctccgtcagtattatacccgatgagcctgtctccctctcttttgacggtatttacggccccgagtactttcgcgctttcatgtatttcatccagatgctccatgatcgcgactttatgcgggactgtgacgttcactccgcagatgccaagcgccttgattccgttaacggcgtccttgagataatgaggttccacctgaaacgcaaaatactgcccgttgatgttcttatcttgcaaagccgcgttatgaatatcgggtgacattgaatgcccgatcggatttccgattactccgtacaattgtttcatgctccctctccccttctctctatattaatgaacggcggacaaatacgtgtacgcctttcggagcgtatgccgttatttttttatctgcttgctgcaccgtgacccagccgagtccggaaaaaacgatatccgtctttccttctttaatcgtaaacgtgtgggccgtaagctccggaaattcatccaaatgatcttttccgggcggggtaagcagttctcccgcatgcttttcgtataaggcatcagcattttcaagctttgttctgtgaatcatcaattcattcggcatatagcagacaaacgccgttttatcgcctgatacatagtcaaaccgggcaagcccgccgaaataaagcgtttgtttttcattcagctgaaaagtgcgcggcttcagttcttttttcggtgtcagcacctttaagtcacgcttgtccacgtaatgcgccatctggtgatggttaatgattcccggcgtatcataaagcgcagatccgtcatcaagcgggatttcaatcgcatcaagcgtcgtgcccggaaattgagaggtggtaataatattctcttcccctgagacctctttaataatccggttgataaatgtggatttgccgacattggtacaccccaccacatacacatcccgcccttcgcggtaatgttcaatggcgtcaatgacttccttcatcccttgtccgcgggaagcgctgattaaaaagacatcaaggggttttaagccgtattctttcgcttcgcgtttcatccattggacgagccgttcccgctttacggatttcggcaggatatcggccttattaccgacaagaatgatcggattaccgccgacaaagcggttcagcccatttatccagcttccgttaaaatcaaaaatatcaacgactttgacaattagagagtcagtatcgccgattgtgtgcaagatatttaaaaagtcatcatccgttaatgaaacatcttgaatttcattgtaatttttcagtctgaagcagcgctgacaaatgacattctccttcgtgagcgatgcctttggcgcgtatccgagaccttgtttatcctcggtctggatcgttactccgcagccgatgcaaacaaccttttccattcctaatcctcccactgaatatggcctttacgtttcaaagaactcaatattctccgttcaatccggcggttaaagcgcgtcatgactccgtcagaggaagcgacaggcacgacgaggatcgtatgatacccgtttctgtttccgccgagaacatcagtaagcagctgatcgccgatgaccacacagtcttcttttttcagctccatgctgctgacagctcttttaaaggcgcgccccatcggttttcttgccttataaataaacggtatgccaagcggctccgagaataatttcactcttcgttcattattattggagacgatcgtgactttaatgccgtgctccttcatttcttcaaaccactcgattaatcgaggtgtcgcactcggtctgtcccactccacaagcgtgttgtcaaggtctgtaataatccctttcacattgcgttccttgagcttttccggtgtgatatgaaatatatttttcacaaattcgtcaggtaaaaaaaacttttttaacaaaacccgcacccttccttttctttctatcatctatatgtcgaaatctgtcagatttaaaaacaaagtcggactcggtaaaaaaatttcgacaaaaattgggtttcttcaccagttgtggataaaattacacacattatccactcttattacatccggatttatccagattataaacaagatactaacaagttatccacttacgagtgtggataacagaacgattgttcttatttgtatttcatggtagattaaagataacctcaccatgattgaaacgcaaccttccatcatatgcttgcgtctgatgattgattacaattgtaaggaggtgccactcccattaattgggtccccggcatgagaaagctttctgatgaattactaatagaatcttatttcaaagccaatgaaatgaatttgagccgtgaatttatcgagttaattgaaaacgaaatcaaaagaagatcgctcggacacattatttccgtttcttcttaaacagaaaaaattcccgggcgaatttcctttttttactcagatgactgatattatatcacttcggttatgcgcattactaccactttcaacaaaaaacacccctaaaatagaggtgtttaagaggacggctgctatatattgaaccaatacagaccgcccagaacgagaatgacgacgagcagcacaacaaaaaatgcgtaccagtaccccgcattcacccgaggaggcgggcatacaggatattgcggagggaaaccgcggttcatagcaatcgcctccaaaagatgttttttctacagcctatgaagcagaagcaaaacggtttaggcagctgacggcgtcagcgttccaaaacccgcccattttttatgccttcaattaagattctggcgccttttggcgtcatatgatttccggagggatctatcagtccggattggatcagcgcccggtctgtatctttgccgccgtccgcgcgtataaagtgtttccagttatccaccagcggcactttcaactcagctgcaacctgcctcgtaacgccgttataggaattatgccatgttctcgcgccgcctttttctttaaaggctgaggctttatatctcgaatagtaatagagatgatgcgttccgtttccttctataaccgggatgcacgtcattaaaatcggctttatgccgtgatttctgctttcgtttatgaaataagtcaggttttctttaaaccgtttctttgatactcgcggctgatctcccgtcaaaatgcccgcatcatttgttccgaacatgataaataaatattggggcttacgctccagcacgtcgctttgaaagcgcaggcgcgcatcctcagtcgtctggccgcctattcccgcatttataaccgtaagacggccgcgttccgctgtttttaaaatgtttacccactgctgcgccttcggataatcacgataatcccagttggaaccgcgcgtattgctgtcgccgaacgcgacaacacttttctctttgcccgcagcgcatcctgataacagacaggttatcgtaataaaaagaacagcaaacttcattttctctccccccaaaccttacctcctatggtacacatctctttggcggctttcaacgcggcgctctctttactggatatgaaaaggaccggaatcctgtccgatcaaatccgaaaccttaacaaacgtgtagccctgctttttcagctggggaatgatttctttcaaagcctcaaccgtctggcgccggtttcctccgccgtcatgcagaagaacgatatctccatctctggcatgtgaaacaacgtgcctgacgatttttccttttccgggccttttccagtccctcggatcttggttccatgaccacatgatgatatgatagccctcttttaagaggcttttgaaagccgtatgattcagcgaccctcccggcgggcggaataacttgtccccttccggctgcagcgatctgatatgatgcgcggagctgtgaagctcttgtaaaatgtctttgcgttttaaacggtgaaaataaacatggttcatcgtatggttgccgatttcatgcccttcttcaacgatgcgttttgccgttacggggtatttgtctatacggctcccgatacaaaaaaaggttgctttaacattgtgctgtttcagcacgtctaacacagcctccgtatagacaggatgggggccgtcatcgaaggttaaagatagcttctttttttcagaccttatatcccagtacacgtttcccgtcttctccatgtcacttctttttaaagatttcgcatcggcggacacggcagtgagacccgtgaggacgcatatcatgatgatcagatgaaagcatctcaacgtttacacctccagtaaacactactgttaacgtgtccccttttgtataaaatcattctctgcatcaaatgatgcacatcacccgcttcccgcatgtttttgtccaaacccggctgccagccgtttctcatcaaacggcaaatgctgataaacaagtacgcttatcggacagcttattttaatagaaggagatagatttgtgctgtatactaattgaaaagaggtgaacgtacagatgataaaaaagggattcagtcttgccgtcatcattgctgtcgtgatgatcggctttatgcaaaaagacgtctggctcagcatgattcgcgcgggcggcatgtatgccgtgcttatgagtatccttctggtcgcagctgacgtattttttccgatcgttccattcgccattatcgcggccttaaacggagcggttttcgggattgtaaacggagtgtggattacattgtcaggcgcaatgctcggaacaatggcattgttttttctcgtccggtacggattcagagactgggccagaaaaaaactggtggcttacccggccgcggctcaatatgaaggttcatttcatcagcacgcgtttacggcggtgcttttcgggcggctgattccgattataccgtcgcttgccatgaataccgtctgcgggctgagtaacatacgatggccgatctttttttctgcgtcggtgctcggcaaaattccgaacattgtgatcgtgaccgtcgcaggcgcttcatttacaagcaacaaactgctgtctttcgggatttacggaatgtatatgctcgtcttaatggcggtcatttataagaagtttcccggtcttttaaaaacaacgaaaaaatgaagcgcgtaccgcctcctattccggcggtacggctcctctcattctgagaacttttccgtttaattctaaattgatgcagcttcgttccgcgttctctttgctgctcagtaaaggtgcacataaccgattttttggctgcggtaaaagttgatggaagcttcaagctgtccgatcggctgcccgttatgaagaagcagcttaaaattgtcgggtgagcattagatttgggatgacagccacctgagatactcatcctcacgaaatgaaacggccgtctctttatgtttctttaaattgatccgcttgaaacacatcgggagtcctcctttttgaggccgcaaataagaacgagcataaaacggctgccaacgccagcataacagcagcccctgcgatgacgatgacgcggacggaagaaccgacagccgccgctccgaaaaccgccgttaccaatataatgaagacggcttcgactaatgaataaaagctccccactctccccatgatgtccaccggaacattcttttgataaaacgtcagaaagcctgtattggcaaacgccagaaaaaaagcgagaaggaaaaatccgaaagcagccgtccaaaaaacgtcagaaaacgcataaatcatatatccggccgctgtgaataaagagcccattcccatcaataaagaagccggcatttttttattaaagattacattgacaagcgcccccgcaataatgcctgcccctgagacactgacaagaaaaccgtaatcggcatcagtcagctgaagaacttcttttgaaaaagcggcttcaagcgaatcaagcgcggatggcataacggtcatgaccagactgaataaaaaataaatgatcatgacgtttcgcgccgttcggctgaagcgatagacgagcttccaatcttctttgcacactgccaaagaaagcttctgtctgggagaatgtacgtgaggctcattttcaaggctcggcagcatcatcgtgatgaaaccggacagcactaaagccgccgcattcacccaaatcgcaaaaatcggcgtgccggcgataaaaagcagcccggccgcagccggcccgaggagaaaagcccctgattccgacaaagcccttagtgaattgaatcgttttctcctttcagccggaataagcatcgtcacatacgccatggaacacggacgaaacatcgcattggccatttgaatcaaaaacacgatacaataaatggaaaacaaagaccttacagtaaacatcagcggcagaacggcaatgaatgcagcccggatgaaatcaagcgacatcatcatattccgtttgttacacctgtcgatgatgctgcccgcccacccatttgtcatcaaaacagccgcaggcctgattaaataaaggatggaaaccgcaaaagcagaccccgtttcttttaaaacaataagattaagagacaaaaaataaatccattcaccaatatttgctatcccgattccggttaacagaagcatcgggtaccgccaagacttcaggtttttcatcttatccctcccttagaaataaaaaacgccctcaagacaataaagtcttgaggacgggaaacagcccgctatgccacctcaattcggtttggtgccggcctcttgccgggtacaaaacttactcggtaacaggagtatccgccgcatcatcctcgtttttcatgattccgatgcgaagctaagaggtttgtttcaacacatccattcatactccttcacagctcccggagctctctgtcatgaatgatatctgtctactcgtctcttcagcgcttttcgttatattcttttcacccttactttttttaacaatatacaggctcaatcagcaaaaatcaagaggctgtaagaaataaaacctgcctttgattaatttccctgtacagacacaaacagcctgactgccacatacagttacatataggcttttgcctacataactttgtggaggtgaggatggtgacaggtgtttttgcagcgctcgggtttattgtgaaagaactcgtgtttttagtatcatacgtgaaaaataatgcctttccacaaccgctctcaaatagtgaggagaaaaaatacttagaccttatggctgaaggcgatgaacatgcccgcaacatgctgatcgaacacaatctccgtttagtcgcccatattgtgaaaaaattcgaaaatacgggagaggacgcagaagatctgatctccatcggtacaatcgggctgatcaaaggaattgaaagctactcagccggaaaaggcacgaagcttgccacatatgccgcacgatgtattgaaaatgagattttaatgcatctgcgcgcattgaaaaaaacgaaaaaagacgtctcccttcatgatccgatcggccaggataaagaagggaatgaaataagcctgatcgatgtcctcaagtcggaaagcgaggatgtgatcgacaccattcagctcaacatggaacttgaaaaggtcaaaaaatatatcgatattttagacgaccgcgaaaaagaagtcatcgtcggccgcttcgggcttgatctaaaaaaagaaaaaacgcagcgcgagatcgcaaaggagctcggcatttcaaggagttacgtgtcgcggattgaaaaacgcgcattgatgaagatgtttcatgagttttaccgggcggaaaaggagaagcggaagaagaaaggaaagtgagcgaaaagccggatctgacatcccggctttttctgcattttaggacattcctcttcaagtataacttcaggatttaaaagtaaaacataacaaatgaatagaattggtacaatcgttaacctttttaatgattttgaacctcataggaacccttacatgacaggatttttgttgtttttcattgtttatcaagatctaaagcaaaagaacttgctatttctcaaatacatccaccaaattttcaatgttagtttgcttttcatacatactactaataaaagtaaaaccttattagaactttacaagacaagctgaattgactatagtctaattagactaaaatattgatgtaaagaagtgaaaaattaaatgataaagtcttttttaatgttggggcagtcgaatatggcgggccgtggatttttgaatgaagtagaccctatctataatgaaaaaataaaaatgctgcgcaatggacagtggcagatgatgacagagccgattaattacgaccgtccggtttccggcgttggcttggcggcatcttttgcagatgcttggtcgaaagctcatcccgatgaagaaattggcttgatcccttgtgcggaaggcggcagttcattgaatgactggcatccggaaggcatcctttttcagcatgctttgtccgaagcccgcttcgccctccgttccagtcaaatttgcggaatcctttggcaccaaggtgagagtgacagttatcgttcgctgcatgaaacttattacgagaaattaactcttatcattgagacgctaagaaacgagttgaaacttgatgatgtaccgttgattattggagggcttggtgactttcttgggaagaccggttttggacagcacgcgactgaatttcgacaggttaatgaacaattgctgcgttttgctaatgaacaacagaattgttattttgttactgctgcaggtttgactgcgaatcctgatggcattcatttagacgcagcttcacaacgcaaattcggttaccgctatttcgaggctttctcgaaaaagcaccatatcctgaaacccatttcgggagaggagcaatcactgaaagtgaagggtgactattctaaaacagaacagatttaccttcatagtatggatttggcttcgggtaaaatcacgtacgcggaatttgaggcgcggatggagaaggtgatgaaaccatgattcccttacttatccttggcttgctcatccaaaaccccggagctcacggctatgaacttctggccttaatggaaaaacgtcattacaaatacattgttaacttcacgaaaggttcattttattacaatctgcagcaacttgaagaaaagtgtttgattgaacagattcagcagaaaccctcaaccagcgggcgtgaaatccgtaactttaaagtcacagattcgggaagggcagaatttgaaaaattaatgatcaaatacggcaccaaatcggaatatgtgaacctgcaattttatggggcgttactctttgccgatgaattcgacaaaaataaattactggaactgatccaatcacaaatcgatcagactaaaactcgaatcgagctccttgatgaatacctgtccatcactcaagaaattcccggcacaatcaattactttcgccgtatgaatgaaaattcccgttcacatcacttggttaatttagagtggttcgaaaaattgaaagcagaaatagagtgaactattgcataataaaaaaatgcaatgtggaatatataagaatattttagctaaatataaaacctgtgtcgcagatatctagtaacatcattgatacaggttttataccccttctttaattaaaccagctaatagggttgtcaacacttgccccaaacaagagcaagtgagtctgctgcgtgttcttctttttcaatccgtatgaataaccactttttacacctattcagtattcaagtaagtcaactgatttttctccttcttccgctaaactgctgctttagtcgaataaaaaaagtgatctcccttaaggaagaatcacttcctctaattgaacaagcagtgaagatgaacatcgttctcgacatcaactaaaattttttaactgcctccgcgtatgcagctttcaattgattgatagtaaacccctcccgcaagaaaactccgtctttttctattttcttttcaatataaaacaatgataactttctttcatcttatgaaacccaagcagttattaggtgttttctttatctgtacaaatacaggtgagtaacttaatttattacatataagttatcctgcaaaactgtgcacgaaatgtcgggcagatacatttcgctcctgttattcttttgttaaaggaggtcaaataaatggattcgcttaaaaggatgaacagcgcattaacgtatattgaagaaaacctcacgaacgctattgatttcaaagaagcagcaaggcttgctttctgctctgaatatcattttaaaaggatgttttccttccttacaggtatttcattatcggaatatattcgccgcagacgtcttactcttgcagcttttgaacttaaagacagccgcgtaaaggtgattgatcttgcaataaaatacggttatcactcaccagattcttttgcacgagcatttcaaaatctgcatggcataaacccatcagaagttaaacataatggccattcacttaaagcttatccgcgaatgaccttccagttatcaatcaaaggaggaaatgaaatgaactatcgcattgaagaaaaagaggcatttcgcatcgtcggcattaaaaaaagagtccctattttgttcaaaggcgtgaatcctgacattgcatcgatgtgggaaagtttagatgaagcagcaatcaaacaactaaaagagctttctaatacagcgcctgcaggactcatcagtgcatccacgaacttttctgaaggcaggacagaggaaaacggagagcttgatcactatattggcgcagccacaacgaaacattgcccaaatcacctatcacagcttgaagtccctgcctcaacatgggctgtattcgaagcagccggatcatttccggatgcactgcaggaagtatgggggcggatttattccgaatggtttccatcgtcacattatgaacaaattgaaggcccagaaatcctgtggaacgagcataaggatgtaacatcgccatcttttaaaagtgaaatttggatacccatttcaaaaaaggaatatatctgacaatgaaattagaggaattaaaggttttaaggaaggggtcttatcccttcctctttatgtcactaaccccatctgcggcaatattgatgccgctaatcttcgaattgagttttttaatgagcagagccgatcttactgaaaatataaattgaggtgtattgcgttttgatgatctgcttctcacttcttattttccgccttaacatccgatcatttctgcaattcttctgcaaagtctgacgttgatgattgaccgccaagtctcccgttttgattcctgccttcacggtttcccgaagtgagttctctattaattccgctgcttctttccgagaataaatcacttcacaacagacaaactgaaggcggtataaaaaacagctccgttaaaatggccggaactgtctttgacttttggattttgcagttatctccatccgttagtttaattagaattcagataatccaagacacgatcaactctttcattgactgagtaatctccttcaatttttaacaatggacaagataaatccgacatccaatgttcgtgtaaagctttgcttctaacttccattccggaatgatcatataaagaagcccactctaaaaatgtttttgattgttcatatttactgccgccggctaacacttcgtttccataacgctgaaattccctatgccttaatctctcaagccgtatatcctgcggaatccataagaagatgacaaggtcaaaataactttttagatcatcgccccagcggcacactgcgccagaaagaatccatttctcatttattgtcaagtcttttttaagtaactttcttctttcagcgatttctctttttttagtgaatttatctgtccaatagtaatcatcagtatcaagatgcgtatgcggcaaatgctttgataatgcaacacccaatgttgacgttccgacaccagaggctcccaatatgtgaatcttatttttcatacttccccctccttatgaagcaaccaaactccctgttgcataaggtacttactattattttgacataaatccctaaagacctttactttgccaggggaatccagatgcggttaaaaccataccgcttacgaacttcatagtcattttcaaacagtgattaactttctctccggcctattttaatatcctcatacactttttcaaaagtctcgattggcagtgaaaacttggttgttttctcgttacggtaattgattacgattatttttttgttcagactcaataagtgcattctcccatttatctctgattgaaatgatacaattttccatttttcttttcctttttcttataaatgtaattcactttaacgcccctttcattgatcggcaaaaggttccgtaataaggaagctccttaaaaaaaggatcaaaacttttatcaagtttgatccttttccctttttagtcatttcttcgcgaacgtttatagacattcatggttaccagccagctcataacaacgattcctgtaaaaagaatgagcatattactgtacaaataagcggaatgatcatcgttaacaggcagcagcctttgattcagcaagctgatcgataataaaccgcctgcaatcgaaatacccgttccctctgataaaaagctcgtaaaattaagcagactcattccggcgccggcttccttttgtttcaaactgccagacacaattgtagatataaccgtttttgtgaaggagagccccccaaacacaaaaacgattatgacggtcataagccaaggtgccgcatctatgaaaaaggcagcgattaaaaagctggaagacatcaatacaatcccaatggtcagcacacacaaagaacctttccgatcaacaagcaatcctccaatgtaaccgaagatgatgacgctcatcgtcccggggaacataatcccgcttccaattgccgcagtacttaaatggtgaacatctttcatcatataaggaaccatagacacaaatcctgcagcagtgccgaatatcaggcctccgctaaggacgcccgtcataaacaaaacatttttccccagtgcagggtcaacaaagggatcttgagttttcctaatatgtttcacaaatatcaggaaagccagaatactgatgatcagaaaagacattctatatgacgttgtaaacagcagaaaaaatacggtgcctgcagacattaatataatccccgtcatatcaaagcgcccgctgattctttcttccttttccagcagtttcatcaggaatggaacggtgataactgttgctgtcggaataagcagcaaatatgaccagtgaatataatgagcgatcattccgccgatagctggtccgacaccttcccccattgccaccagcgacccgatcagaccaaatgctttacccctgttttctttcggaatatagcgtactactgcaaccatcacaagagccgggaatgcggctgcaccagccccttgaataaatcgggccagaatgagtacaggaaagaaagagtgtccgacaaatccaatgatcgatccgaagccatttaccataattccaaataggagcagttttttgatgcccagctgatctgataacttcccatacagagcagttccgatggaaaatgttaacataaaagccgtgttcacccagtttgcactcgctggcagtttatgaaaatcgttggcgatatcaggtaacgagacgttcaaaaccatttcatttaatacgctgaaaaatgacaaaacacaaagccaaatgaacacttggttgtgccgtaaagctgactgtgaataaggcgtattcacaaatttccctccattaatgagggcagacgcagtttatagggccattgatacgcttccctcttttaattgtaccctgttcatttttttgcacttcatacataactccccctgcattgattgatataccttattataaatcctcaagccgatgttttgaatactttgcggcacacacccgctaaatgacgaaacatcaaatactgttatatttaaaatttacagtaccaaaaaaccgcaatttcatttgctgttgaaaaattggaataaagcattgtatcgaccgctcctatgacaaagttatttttggcataaaaatgacaagctgaaacattaatatcttgtgtttcaagcataagaccgcataaatgattctcctttgcccactcaatcgctttatgtaataaagccgtcccgacaccattttttctataatcttttgcaacggcaatgtcttcaatcagtgcgtatccattccaattagaacgaagcttactccggccgacacagtcgttctctgcgtaataaaaaaagacaactttatcctcttcttcagcataactgacatcaatgtcttcatcgtcatattttttgacataaggttcagcaaatttctcctctgtatatgtccaaacattgttttcaaatgaagggatgattctccctgaaacaacgaaaggttcgtttggtttattgaagtctttcatattgaattgagtcattttagttatcatcataatcgcctttctgcagttattgaactcactttacaccttttgaactgttgattcgtctgcatgtcacgaagactaatacaaaaaagataccaacattgattggtatcatctattcgttcgagcccttacaacaacatcctatttcggagcttccaaaccaaatgttgtccattcctcttttgccggaccataaatacccggaacaggtaaacctgcttgtctcataaggacagtcatttgtcctcgatgatggttttgatgttgaattaaaaacatcaaaagtgaaccattcggcaattgctgaccaataaagttgacacattcttgaagtgtatcgtcagtccattgcgtttttaacgcctgcacaaatgcattactggcttgatgataactctcagcaataaaccgcgccgatgcaggaacaggataatcttcagccggagcgtggaacgttaaatctgtgttcgaggtaatgatatgaatggccgcgacagtatgccatgcaatacggcctaaagtccaatgttgtgaagtgatttcttgtttaagtgattcatcagtcagatgattcagcagtttttgtgtcgcatcggcttcgaattcccaagatttcaaaaaatggtctaaggtttgaaacataaaaatcctccttatccttttttgtgtttctatatatctgcagttcaattatagcgctccgtttagttaaaaaagaacaaaacgatacacagacaatacaataacagacaaaatataagaacataacagatcactctatacttccttttcttcaatcggcaaaaaaggatagctgttcaaacaggattcttctgtgtctaatattttcgctttacaaaagtccataccgtcttagtgattgaaccggagataaaacagctccccgtcatcatagccacccaaatgaaaaatgtcggttcggcacctattacaataaacataaatatcaaggacaaaatgaatacaataacaaccatcatccatacttttttgaagatgaaatatcctaaaatccctaacagaaaagaagctgctggaagaaaaatgagaatgatatacgcgggactcaacagcgggctaatacaaacacctcccaatttcaaaacgaggaagttcctactttttgtctgatatcaaatgatatgaagtgatttatttcatcttgatattacgccgtttcattcattttatacatattataccaatacaattgggtcaaatatagatatttattcatttttaacatattttcggaaaatcaggagtgatttaaagtcggaggatagcccgctttttcttttcctagtaagtcctgccgcattggctttagcccatctgctttctcattgtttttgcagcgctaatattctcataatcgtgtgcatgacgctgctttcgtcatttgatttgatgacaaagtgcgccgcatcttttatttcgtcaatggcgttcttaaccgcaaagctgtaggaagccgcttccatcaattctttgtcattgcggccgtctccgaatgccattgtttcatcagccgaaacccctaataatcgctgcagttcttgtactgttgatcctttatgtattccgatatttgatatgtccatccaggtatcttctgatgctacgatatataattggtgaaaaaattcatgcagcttttctctcgtttccggacagttggcgtcggggtcatgaaccgtaatcttgataaaatcgtcttttatctcagtaaaatcagttattttcgttacatgtgcataagaggcatttacatatttcatttcactttcagacagattttcttttacgatcgcgcctttttttgtgcacgcgataatggtgtgcccgcagctgattttttctaaagcgcctataattgacagtccggctttattgctgatcaaagattcatatacgaatttgccgttctttttcatacgtgcggcactgtctcctaaaatccaaaaatctttcgcgtcttctccgaataaggcttccaccctttcacactgtttcccggtgcagatggcgaaagcgacatgctgttcttccattactcgttttgtcttttcaaataacgttctgtcaaaatcgccttgattatttaaaaatgtgccgtctaaatccgtaatcactaatttaatcatcgttcagcacctccgcagttaaaatgtctttttcagacaaagggtttttcacatttgagaatggaatcaatcgcgtttaagaccccttcctcattgtttgattgcgcgatatgcgccgcggcctgtttaatgctttcctgcgcattatccatagcgactccgtatttcacggcagacaccatctccaaatcattgccgctgtctccgaaggccgcacattcttcatcatttatcccccattgtttctggagaagcctaatcccgcttgctttatgaagccccggtatgatcagatctatgtcaccgtgcccgcttgatacaggcgtgacgaaagacccgatggcgtcttttaaatgcctcagaagtgcggaacaatgttcggcgggaaaactgatggaaaattttaaaatgtcatcatcgatgttttcaaaatgcggcaccctttttaacacataataatacttactggcatgcagatattcatcctcactggcattttcatgaatatacgcgcttttttttccgcagacaatgacgtttttcacctcatactgctctaaagcacggatcacctcttttatagtgtcttcagacatgttacccgcgaataattcttctccggcattcacgacgaaagcgccattctcggcaacgaaagcgatttcacttttgatttccggaaagaaggatgtaagctgcgcatattggtttccgcttgctacggcaaatttaattccccgcgcttttaattcacgatactgattcataaaacgctctttgttatatgccatttcatcattcaaaaacgttccgtccatatcaaccgctatcagtttgatactcatattgtcctccttttttcgaccgcttttgtcagagacccttgaagagatcatgcataagcgtatgaacgaattatatccgcagttgttttgcaccgtaaatcattggctgacgtcttgttttgaatgacacaaaaagtgatttgtcacataaatataacactatgtttcttttaaaaatgatatgttacgatgagatgtacattcaccattctcataaaaaggagaatccccctgcatgttcacacacgaaatgattgcttcatttaacgagcttgaaacttctttatacaactacatctcccaaaacagcgagaaagtcgtctatatgcgaatccgtgaattggcaaatgaaacccatgtatcgacggcttctattttacgtttctgcaaaaaaataaactgtgaagggttttcggagtttaaggtgaagctgaaaatgtatgcggaggcaaataaaaaaacgattttaaagagtccccatcattccgttgccgagttttttgaaagaacagtaagcggagggatggaagaaaagctgaaggaagcagcagcccttgcagccgatgcagaaagcgtcatttttatcggagtgggtagttcaggaattctcgccgaatacggagccagatatttttcgtgcttagggaaactttcaatgtatattaaagatccttactttccggcccattcccatttccgccataacagcatcacgatcgcattatcggtttcaggtgaaggagattctacggtgactcatctgaatcagctgaaacaagaaggaagccgggtcatcagtattacaaatcataaacattcaaccattgccaaaatgtctgatgtgaatatttcatattacgtgacggaagaatgggttgaaaatgcgaatatcaccacccaaatccccgctatgtacatacttgaatcaatggctcgggagatatacaaattgagagattaaattcaggaacggaccacggaaatttcggcctttttgtaaaagtgatgaaaaacccttctctgctgccagagaagggttttgaagattacagatgagacacaatacactttgcatggcccgccagtttatattctcccaaaccggaaggcaggagaatgtgatctccttttctaaagggatgttcatgcccgcctgcaattattattccgtctccttcgatcacgctgacaagaaggaagggatgattctggaataaattcgcttcaccttttacatcccacttttcgactgaaaaataaggacattctattaaaacagctgccagcagatcatctgtttgtttatattgaacggtcggccgttcacggacagatggaacgtctgtcacttctatacttttttccaaatggagctcgcgcagcctgccgtccgcatcttttcttccgtaatcatacaatctgtaagtcgtatctgaattttgctgcgtctctaaaataagtgtgccctttccaatcgcgtgaacggtgccgcttgggacaaagaagaaatctcccggctttaccttaactctgttcagaagtccgtcccattctccgcgctcaatcatggatatcagttcttcttttgttgttgcgctgtggccgaaaatgatctccgcatctttttcacaatcaatgatataccagcattcggtttttccaagttccccgttttcatgcattttggcaaagtcatcatccggatgcacctgaacggacagatcttggtccgcatccaaaatttttgtaagaagaggaaaacggtctccttcaaggtttccgaataaatctctgtgatgctcccacaattcaccgagcgtacatcctttatacatgccgtttcgaactgtgctctgtccattttgatgagcggcaaaggcccagcactcccctgtccgctcggacggaatattatagtggaaatcacgcagggcggcgcctccccaaattctttctttgaaaaccggattgaaaaatatcggttcagtagacatgatcatcccccgctttattcgatttcttccagaagcccatacgcctcttcttttgtctgaacggagagcagcctttcccgatagctgtcatccatcagttttcgggataacatctgcaatattttcagatgctgatttccgccgctttccttcggtacggcaatcataaaaatcagttttgcatcagaaccatcaaggctgttccagtcaacacccgaacgtcttattccgaatgcgacacccggcgttctgacggcatcagactttccgtgcggaatggcgatattcatacctatcgccgtggttccctgctgttcacggctcaaaatggcctgtttaaatccgctgtcagacagaagcatacctttacgggacaatttctcgatcatttcatcgataatgtcatccctcgtttcgccggataaatgcggttcaatcaagtccgtgctgataatgtcagtcagttttttgatttcggtcatcccggcttttcggctgtcagcctgagatggttcctttgtttcttttgccgctgcagcttcatttggtgcggcagacggcagcacctcaccgggcgcgggggatttcgccatatctttcttcagtacattaaccaacagagcggtgacaagagagcctgctgttacagcgataaaaaacatcaatacatgatctactgctccaagtacagcaacgatggggccgccgtgtgccactctgtcccccacatggccgatcatcgctatcaccgagccggtcatagaacccgccataatactcgggatcacacgaaggggatcttgggccgcaaatggaatggctccttccgtgataccgaaaaggcccatcgtaaatgacgcttttcccatttctttttctgcggcggcgaattttctttttcctaaaaacgtcgcaatcccaagccctatcggcggtatacaaatggaaacggcaatcgggcccataatttcataatttccttctccgatcattgccgatccgaatagaaaggccaccttgtttacgggtcctcccatatcaaaggagatcatcgctcctaaaatcaatgccaggagaattgagctcgagcctttcattcccgcaagccaaaccgttaatgatgcgaaaatatgagcgacgggggcgccgatcagaaatacaaacgccaaaccgacgatcagtgaggcaaacaccggaataataatgatcggcataatcggctgtattgctttaggaactttacattttttgattccaagcgccgcatatcccgccaaaaatcccgcaatgattcctccaagaaatcctgcgccgctcgcactgtcgtaaaagctgccggatgccgcaatatatccgccgatcattccggggacaagacccggcttatcggcgatgctgaacgcgatgtacccggctaaaatcgggatcatgaatgaaaaagaagcgctgccgatctgttcaatcgttttccaaaaagacgcatccggaatgactaagccctttggtgttttttctcctccaagcgtcaatgcaaccgctatcaataatccgccgacgacaatgaaaggaaccataaaagaaacgccgttcattaaatgacggtaaatcgggttttgttttttgccctgctgacttgcggattcagtttttgaagcagattgatagaccggcacttcaccgctaagcgctctttgaattaattcttccggtttgcggatgccttcctgaaccccgacggccagcagcttttttcccgcgaatcggtctttgttcaccgaacggtccgccgcgataatgattgcgtctgcttcccggatttcctcttcggtcagcctattttccaccccgattccgccctgggtttccactttgatctcaacgcctaatctgccggctgctttttgtaaattttcagcagccatatacgtatgggcaatgccgttcggacatgatgtaatcgctaacagtttcatataaatcctcctttgcagtctgaatttcaagatcttgtctcaactttatactgaaatcagcctgtgataagcgcgtttttttaccataagttccggaaataacggcatttttccctataaacagaaaaaaagcagggagccatcccctgcttttaatagtttaaatacgataaaaacgtcatcacatttttttcttccgtcagtttttgaataaatgccggctgctcgctaagataggaaagctcactgaataattgctttaccttgttttgatcttcgtgtttgacggcaagcataaatacaagcgacaccttttccgtcccccactcaatgggctcttttaaggtggcgattgcaatggctgattgtttgatatatttagagttcgcgtgagggatggcaatacccgccccgatatttgtcgccgacattttttctctcattactgcatgaatgccatactctttttctacatagcctttttcatacaaagcctgcgccagcttttcaatgacctgataacggtgctctgtctcttgctgtaaaaaaacgagaaacggagtcgtatcattcagcattttaaacgttttttgctcccggcggtgtgatgtatcaagctgttgcataaatgcgctgagcttcttttcatcagcaggctccaaaagcggtgatacgacgatatgagggatcgttacatttccaagccctatcgtagaaatgacgaaatctatatctttatgctttttgatatactctgtcagttccgcttttgcgatacagtcttttatcgtaatgtgatgaaatttgcgttcaattttagtccgcagcaattgcgacatgccaatgcccatatggcagacgatgatcgtccttttagggttatgactgcttcggcgcagccgttcgatcgctgcctgaaaatgcagggtcaaataggccgcctcttcttcaggaatataaagatcaaatgtttgattgatgtcttctaaaacgtcaatgataagatgaaacaaataaggatacatttttttgatgtcgtggagcatggggtttgaaacagagagatcatagctcagccgcttcaacaccggatcgagatgaatgttcaatccattgatcaattcctggtctttatggaaatccagcattttcagttctgaaacgcgattgatcaaatgcctgacgactttggaaagctcagaatcttcaagatcaagcttcttttcttgctgcaatggatagcgcactttcccgcctattatatgtaaagttaaatagacggcttcttcctcgggaaaccggatggcaaataccggctcaagccgttttaaacaagccagtgtccattcatattctttcttcttttttaccgcctccagctgccttgcagagatggcgaccggctgtttcattttgatacggcggatggtcagcaatgtatgcagcagcaaactttcaaatgtttcatccgtaaaatagatagaatggtttttttgtaataacttgatttcttttctcacaaagtccgcttcatgacttaaaaacttactttttataaattggcttgtaaactccgcattatcaatcaaatctgaaattcgcgccaatgcttttcttttgtttttttcgtccccttcaatctttaagccgagccgctgtttagaaaccagtgtgagatcaaatcgcttcagccactcttcaaccgcactgatatcctttttaatggaagctctgtttacaaaatgctgtgcggcaatttcttttgcggaaacgggctttgaattcattaataaatcataagcgatgtgaagtattctttcttcatcggtcttgtgcctgcatgtaaagtgctcattataaatgtgccggcttaaccgtgatctttcctgttcagatatatgtaaatagacgcctaatcccggtttacggatcagctgagcttgagcatgttcattcaggaaatcttcaatcgttttcaaatcattcctgatcgttttttcagaacagcggaccctgtctgcgaaatcttgcacaactaagtagtcatcaggttcagataacaacagatacaaaatctttttctgtcttgaattcatgtatttcatctgtttttctatccttcctgtccgtttctgctggagcaattgtgataggttaaatataccgcgcatacgaaaccgttttcattgtatagtgaaacaaaagagtaaaaagttttgttttttaccgcagattccggaaaaatcatgttttatactgaggctgttcacctttggttgacaacaaaacaccaaccgtttttaaacgattggtgtcggcagcgaaaacctgctgttacagccaaaatgtttcgccaagcgctaatgctctcaggttttcaggaggtaatgcaagccggtcccactcaccgtgcagtctgcttaatgcttccgggcctgtatcatcagcaagccggaatgccccgtaatgcatgggaatgaagctgtcagccttcagctctaaaaaagctttcacggcgtcttccggattgatatgtgacactttcataaaccattcgggttcgtatgctccgatcggcatcagggccgccttaatacgaaacctctctccgatttctttaaagccttcaaaatagcctgtatctcctgcaaaatagatggactcgccgttttcgctttctatgacccagcctccccaatgagaagtatcggtatcccaaagcgttctccgggtccagtgctgggccggaacaaatgatatattcaccccccgcatctcaaaacgaccccaccaattcatttcatgaacctttttgcggcctttttgatgaacagctttttcaatcccgcaggcacgtaaaaatccgggtttcctctcagtttttttatactcggaaaatcaagatggtcataatgcccatgtgagatgagcacggcatcaatgtcaggcagttcgctcaattcatatcccggctctgtcagccgtttttgaaaacccatcctccgcgcccatacagggtcggtcattatgttaagcccctgtatttggatcagaaatgaagaatggccgatccatgttatggcggtttccgtccgattgacggcaacatcacggacatcccttgtgaccgctttcggaatattctcgcttaaatctttacttttttctcttcgttctttcatccatttccacatgtccatgaatccatgttcattcttcacgccattcaagttttcatatctttttttcattatcattctcccttgaaacgtgtattccattagatccaccggacatttatacaatgtctgtaaataccgccccgcttgcttcggctaaatcatgaggcgctacttttagctgcattccgattttccccgcactgacaatcataaacgccagtgtttcagcggatctatcaataaaagtaggaaacctttttttcattccgatcggagagcagccgccgcgtatatagccggtcactcccaaaaggtccttcatggcaatcatttctattttcttctcacctgccgccttcgcagcctttttcagattcagttcttttgcaacgggaacgacaaagacgtaataacgatcagttcctgcagatgccactaaggttttataaacatattcggcagagtatccgattttttgtgaaacggaaagaccgtctgcgggctgtcccccttctgttttgtaacctaatagctcatagggaatgttttgctgctcaatgatacggacagcatttgttttcactgtttttttcgccatggttatcctccgttttctgtatttctttctgctttattttcaacttcgattttaataaaatgaccgctcagttgcgtgctttgtaataatcaagtgcaaactgtttaaaacgctcagcagcgggagagagagcatggttttttaactgggctaacgctatggtgcgttcgcattggtaatctgcaaccgggagaaaaacgaccggaaagtatgaatgctccgcggttttcggcagcactgcagccccaagacccgcggcggtcagccctaatatggttgacacttcctctccttcaaatgcgagatgcgggtgtatattcaaatcccggcacatcagatcaaacatatatctcagcccgtatcccggtttaaatccgacaaaatcctcgtcctgcatctctttcatttgaatgcttttattttctgcaagcgggtggttctcaggaagcaccgcataaagaggctctttctccagcactgtccattgtaaaagctcgctgggaagcggcggggagctgagacagatatccgcatctcccgtttccaccattttgcgaagcgtttcatttgcgccttgatacagccggaaggtcacgtttgggtatagctttttaaattcggcaatcagctgaggcatcaagcgcaacccgagcgtatgaagaaaagatacagatatttcgccgtgctccaggctcatattttttttcacttgttcaacgccttcatttaaagctcgtctcgcttgttttgcttttattaagaactgctctccgtgccttgtcagccggacggcttttgtctctctgtaaaataacggcgcgcctaattcttcttcgagcctgataatcgatcggcttaatgccggctgagaaatcattctttcttttgccgcatttgtgaaatgctgatgagttgccgccgcaatgaagttgtcaatttgatgaagctccattttctccttctcccctttcttcataacctacacgcattaattctatagttattataaattagacacattgaaatgaaaagcgtacgatacatatataaccaacagtgagaaaagagggacattcatgacgtttattcagcctcatacaaaggcttacagaaaggccagcttggcactgtttatcagcggctttgtgacatttgccacgctttacacgacacagccgcttatgcctttgttttcggaagagtttcatatttccgctgcggctgccagcttaactttatccatctcaacagccgttttggcattttcattattggccgctgcttcgttgtctgacggattcggcagaaaaaaattaatggtgctgtcgttaacagccacttctgttttaggtctattaacagcgttcagtccggcttttccggcgcttttggcgatgagggggctgctcggtatttttctggcaggcgttcctgctgtcgctatgacatatgtaggcgaggagtttgatccgaagggcctcgggaaaatgatgggcctgtatatcagcggcacaagcatcgggggaatgagcggcaggctgttaacggggcttctgactgatgtattcggctggcggccggcgcttgccattatcggcattctttctattatattaagctatttgttttggcgttttcttccggctccgcgccattcatctcagcggcatgcgggcgtaaaagcggcatgtaaggaatacggagcggttctacaccgcaaacggctgcttttgttaatatctctgggatttatattaatggggagttttgtgacattatataattatatcggctttcatttaatggcggctccttatcatttgtcacagactgtaatcggttttatttttattgtctatctcgcgggaacgttcagctctgtctatatggggaaaaaagcagatcttttcggaagtgcaaaaatgattaagattgcgatttttgttatgcttgccggcgcagcggtgacacttttgccccagcttgcccttaaaattgcgggcattgccgtgtttaccttcggctttttcggcgcacattcaattgcaagcgcctgggtcggccgagcagccggtgatcagcgcgcgcaagcttcttcattatatctgcttgcatactatatcgggtcaagcgcggccgggtcttgcggcggtttcttttggacgcattttcattggatcggtatcatttcatttatttcggttttgctattgctgtcttatccggttttatttctggcggaattcagaaaaaagggacatagccgcctgcatgtaaatcaataaaaacattaaagatttgtgtcttttgtccgatactaaagataaggccggcacgatactccctataactattccttttgattcagtagatttcaaatatcgtgccggctttcttcaattaaaacacaatcttcaattgccttacgcttctgttacacacctgcccaaacatctttcgcatatcttccttccgcctgcagctgttcaagccaattcgaggaaacttttgaatcagtgttatgcaccttttcatacgcctgaagcagtacattttcgacagccggagccattttgcttccgtctccgcatatatagagatggccgccttggtcaagaagcgcaataatctgtgcagcctcgcgaagcaggacatcctgtacgtaaactttacagtcctgatctaatctggaatacgcccgatgcacggtgacaaggccgtttttctccgcatggtcgaattcatctttgtacagatcgtcttcttcagggtgtctgcagccgaagtataaatgagcttcgcccaggctgttaccggacattttttctgcagcccgcgcctggataaatcccctgaacggtgcaattccggtgcctgctccgatcataatgagaggcgttttcgtaatttcgggcaatgcgaaacccgactgcggcgagcggatgaaacagacggcagaatcgccattttgtaatccggctaaatagttcgaagccacgcccttgtattctccccggccgctccacgccggagccgtcacaacgccgaccgtgatactgagctcccttttgtttgccttcggtgagcttgagattgaataatagcgcgcctttaaggacggcagaagttctaaaaagcgctcaaacggcagttcacacgccggataatcttccagcaggtccagcatggtcattcgttttttcagcacgttttctttatatgccgcatcgtcagaataaagatgctccaattctttttggtgcggcgggcacacggtatgggcggcaagttcgcgaagctgggctctcgttgccggttcctgcagctctacatatgacgccaaaagctccggcgcattaaccggccggtccatcggcagatgaggcagctgccggcccttgatcttaaagtgctgatttgggtcgagaccgaatcggcgaatgacacggctgatcagttccccgctgttttgcggaagcaccccgagatggtctccttcccgatacgtttcggtcttcgggagacgcagctcaatatgccggactgaacgcttgctgctttcggtatgaagctctttgtttgtgatgacttccgcctcaaatgctttgtacgttttggcaatcggcgtctcggctgcttcacttacgtattcgattgataactgtgatttgtttgcctgttttggagcggcctctatatgaaaagccttcatgatgtccttccagaatgagtcttcccaggcttcctgactgtactcaaaatcatcggcattgtcgccctccccgatagaagtcagccgttttgcccctttttcttcaagcactttgtctatcaggcggggtaccctctggtaagtggcggcccagttacggtctccgcagccgaagacggcgtaagaaacaccctttaattcctgatcttcaagggtttccatccatttcacaaaacccgccgcattatcaggcggcgccccgttataagaagccgtcacaataacgactgcgccttttacaggcagtttcccggcataatcatcgagcgggccggtttcagttgaaaatcctttgcttctgccgatgtcagccagctcttccgcgattccttccgcagttcctaaatttgatccgtaaagaatgagaagcggcgttccgtgggacgggatttctttcgtttcttctttgtgaccgccgccttcagctttatggttttgtacgggctgatgattggacacgtccttgttttttacacggattttaaaatcaccgggcttaatggttaaagcttctttaatcgtaagctcataatcagtatgatcaatcagttcaaagtgtttaaggacaaggccgagcaccattgtcgcttcctgcagggcaaactgcatcccgatgcatgcgcgctgtccgtttccgaacggcttatacgcatcagccggaattgccgcgggatcgctgaacctttccggacggaatagctcggcatcttctccccacgcgcttttatcccggtgaagctgcggagtcagaatcgtcaccggctgtcctttcgcaatcggatatttcccgccgagaaccgtatcttctttcgcgtacagggaaaatgccggggcagtcggatacagccgtaaagtctcgttcaacaccatgcgggtatatgtcagctgctgaatctgcttatattcaggtgtctctcccgtcagcacccgctcggcttcctgaacggcttttttcaatttatctttatttttcagcaggcagtaaatcgcgaatgaaagcagtccgcttgtggtttcatgccccgcgatcaaaaaggtaatgatttgatagcggatattttcatcatccagcctttcacccgttacaggatctttcgcttcaagcatcaatgctaaaagatcagacagattctcatccggattttccctccgctcagcgatgatccggtctacgagttcattcatcacttcaatatcctgctggaactgatgtctcgttttgatcatcagcttgtcctgcaggctgtgtctctgtgattggcgcattgcctcctgcagcgcgcgaagcatacttgtgataaaaggatgctgtgtgtcgcggtaaaagctgttaaagcggtaatgaaatccgcacaggccgattgtatccagcgtcaggcgcgtcatatcttcggcaacgtcaatttcttcattcggatttaatctgctccacttctgcacaagctgcatggcaatatcaagcatcattgaatgatagcctttcatcgccttctggctgaagctcggcaataaaatccgatgcgctttctgccaattcttttcgtgagtccagctcgtaaatagtccgtcaccgccaaactcacggactttcagcaaggctttgctgaggtttttatcaaatcgcttttcatcacagacttctgccgcgagctcgcggcctgagacgaagaccccgacagagctcggaaattcgaaacgaaagatcgggccgtattcttcggcaattttccagagcgattgtgacagtttttctttttccaagtgagggagatttttcagaggtccgtatgttttcggctgcggtatagcgcttagctgtttcatatcgatcttccttccttcggcgaatagttaatgagttctgatggcatcccaagaacattgttccaattctttcagaaacggttttgttatttcgacgcttcccgtccggataagctgatagagtttgagatatgccccgagcagcagcgccatcagcacattggacggcagattgcggagcacaccttcagacttgccgcgctgaaaaaagacgtcaagcatctgtgttatttcatcaagaagcttacggctcgtttcattcagaaagtaggcgtccttattcgtttcaagaaaaaacaatgcatactcactttccttcgtaaaatcaatcagacaataaaacaggtgatgaaacccttctcttacagagataccctgaaagtccgttttgacttttttcataaaacgctgcgcactttcctgatacagtacgttcacaagtgtctctttactgtcaaagtaacggtagattgtgccggttccgacatcggcctgagcggcaatcatcggaatcgtcgttgcgtcaaatcctctatctgtaaacaaagtaagcgacgctttcataatgagttcaaccttgtttgaagctgtcatttcatccccctttccagatgcggaatgaatattcattccgtttgttcaaaacatttaaaatgtacggtcatctgattaccattgtataagaaaaaaactttttttaatataaaatagatgtgaaataaccaaaaataaggaaatatgcccaatttcacaaaaagagctgcagtgacttaagcagctctttttatttcccaagaaatattctatttaatggcagtaataaaatggaatgaatctctgctgacaactgaaatgtctctgaaatgctgatcatagagcacctcaatcacatccttctcactcatccgcgaaggtttcaaaaccatatagaaacacccgtcaatttgaagaacgcggtacacttctttacatgctgtcctgtaatcgctgactgtttcagcagtatgtaatgagaaaactttatgaaagctgcgatcgcggaacggtaagctttcaggcctcccctgctgaatgtttccgcgcccggcttttataaccgaacggtttgcgcgctgtgttttccgtattttacgtttcgatgtttctatgcttttaagactgcccttttcaagctgtccgatgatttgtttaaacattgagccgtttccggtcccgatttccaaaatgcggtcgtattcctgtatgtccatcaagatttgctgaatgactgactctgccagttctgatgcagcaaagtatttcgcgcgcattcgttttaatgctgaagatgtatgttgcaacattgtataacacccgcttttccattcctgtgatttattattcagaaataatattacctcgtattagtatgaggtactaactagacgcacttctcttcatgaacgtttcgatttatttgaaatttatatttgttttcataaaaaaaagacggaaaacgtaggttttccgcctgctctagtaccaataatacggtgctatatatcttgtctgccgggaaagcgccgccattctctgccggcgatacgggttgccgtagccgtgtttaaatgaatggggcattgacgcatacccgtgcccgatggatggaattctgttctgaccgccttgcatgctatcacccgcttaccaatttttctttctttaccatggtatgcaggccgtctgcgacgtgacagcaacatcctcgctaaacctggtccttctccattgtgtaatgattcagcagttcaattctgaacatgatgatctcctccttctcctccgttttggcccttcgtgtccgttcagttcatataaaagtgtttcagctggcgttctttcgcttcattataaaactcttcgacctgctgttctcgttcatactcttccgcacttttaaaacgctttgaaatggtcagtgttaaaaagaaaagattaatggtcattatcgctcaccccctttcaatatccgcacaagcgaaaataacccgcagcaaacttcatatgcgctgcgggcagactaaatccgcagacaaaagaagacgtgcttctttccctgcggggagctgcgaatgtcctgatactccgaaattaacgtgcttgacgggcagaggttaaggaaggacacgaactcttccacaggctgaatcggttcaattgtaaattttgattgccgtttaaagtcgtcatgtgattcaacctccctttgcttttttcttactttgtaagtatatccatcagcttccattttgtaaacatttttttcaagatttggacggaaaatgtgctggcattccgcttcaattgtccttgttttccggcatctttcttacctcaggaaactcttttcatcccttgctttttctgatctttttttgaatatgcaataaaataaataaggccgacaaacactgccccgccgattacattcccgataaaggccggaatgagattgccaatcagatcaccccacgaaaaagaacctgcaaaaatcgcagccgggatgataaacatattggctacaacgtgctgaaaaccaatcgcgacaaacgccataatcggaaaccatatacccgcgatttttccggctccgtcttctgcgccgaaagaaagccagacggccaaacagacaagccagttacagccgatcgccgaaacaataacttttccaaacggcatatccaatttgccttgtgcgaccgcaatcgttttttccaagtaaggtcctgtttcggttaatccgacaacatgtccgaaaaagtaagcgacaaacagtgcgccgacaagattcatcaacgtcacgatcacccaatttttcactaatgcaccggcggatattcttctggaaaaaagcgccatagataccgacatcatattacccgtaatcagctccgcgccggcaagaacgacgagcaccaatccgatgggaaacacggacgccccgattaaactcgacaagcttccccattctttcggaaggtcgccgatgacacggatatcaagcaaataaccgagtgcgataaacgctcctcccaaaaatcctaatacaatcagtgctgaaagcggtgaatgcaccttttttacccctgattcgaccgcaagctccgctatttcgtccggtttacgaaaagccataataacccctccatttatcatttcagccccgcagtttccaaagacgcctaacaaaaaaggcagcattcaaacagcccgtctaaaacgggtttgaatgctgcctaacttgtatgcatacccatacaacaatatcaagcagaatgaaaatatcagctatagaaaatgtacagatcatgcacacattccataaaattcgtccttaagccactgcaggcagttcatatcatatcaaatgtgacaatttcgtgtcaattgaatttttttcagcttttgatttcttcacggcgctcttcaattgttcggtcaaagacaaatacagacaccgcaatattctcttcgatcttgatgtctgaaaacagatgcacgagctttgctccgatgagctcttccattccgtcaggcgtttgttttgaatacagttcctgaattaagctggtccgcgccgcatgaaccatttctcttccttcaggcgtgcgtgcgataaactgctcacttgcgcttagattgccgtaaagcgttgataccgccatgttatccacaaaaacggtgtgaattcgttccggcccctttccaaataattctttgcgcaatttccggataatatcgttaaattcatgaatttttttagacatattgtcccctccgattttagcctatgaaagacattcccggttcccctttgtgacatttcacctggttaaagttttcctttcgtattgtattataataaatatcaccttataataaaagcagtgaagatggatttgtaataggaaacgtgttatgagtctatcgttttatacaaataggattggtctgttagtaagacttgctagtgaactattccgccatgcgtatttataccgttctccggacaggaggccggtatctatgtgcatggctttttttcgagtttaaaagatggaggggaattggaagtgacagacgttcagtctatccgtgtcaaaattgacggcacggagtatgaagcaccagaggggtctaagattttagatattttaaaccaaaacggaattgagattccgcaaatatgccatgtaccggaagtagatccgattcaaacatgtgacacctgtattgttgaagtaaacgggaaattgcagcgctcttgttccacggctgcagaaaacgggatgtccatctcgcttacgtcgggaagggtaaaagaggctcagacagaggccatggaccgcctgctcgagaatcacctgctttactgtacggtatgcgataacaacaacggcaactgcacactgcataatacagcggaaatgatgggaattgagcatcagaaatatccgtatacgccgaaagatgattcaaagtgcgcggttgatatgtctcacccgttttaccgctatgatccgaaccaatgcattgcctgcggccaatgtgtggaagtgtgtcaaaaccttcaggtgaatgagaccctttcaattgattgggagcgcgaccgcccgcgggtcatttgggatgaaggcgtccccattaatgaatcatcctgcgtcagctgcggccaatgtgtcactgtctgcccttgtaacgcactgatggaaaaatcaatgctcggccaagccggatttatgacaggaataaaagaagatgtcatggaaccgatgattgatttagtgaaaaatgttgaacccgactatacaagcatcttcgccgtgtcagaagtggaagcggctatgcgcgataaacggacgaaaaaaacaaaaacagtctgcacgttctgcggcgtcggatgctcttttgaagtatggacaaaaggccgtgacatccttaaaattcagcctgtttccgatgctccggttaatgcgatttccacttgtgtgaaagggaaattcggctgggacttcgtaaattcggaagaacggattacaaaaccgcttatccggaaaaacggcgcatttgttgaatcgtcatgggaagaagctcttgatcttgtcgcttcaagactcggttcgatcaaggccgaacacggaaatggttctgtcggttttatttcttcttctaaaattacgaatgaagacaactacgttattcaaaaattagcgcgtcaagtatttgaaaccaacaacgtggataactgttcacgctactgccagtcaccggcaacggacggcttattccgcacagtcggtatgggcggtgacgccggcacaattaaagatatcgcaaaagcgggcctcgtgctcatcgtcggcgccaatccggcagaaggacatccggttctggccacacgcgtgaaacgtgcacataagctgcacggacaaaaattaattgttgccgatctgcgcagaaatgaaatggctgaacggtccgacctctttatcagcccgaaacaagggactgaccaagtctggctcatggcagtgacaaaatatatgattgaccaaggctggcacgatcaagcgtttattgatgagaatgtcaactactttgaagattataaagaaacgctgaaaaagtatacattagaatatgcggagcgcatcaccggactttctcaggatacgatcatccgcattgccgaaatgattcgtgatgcagacggcacttgtgttctttggggcatgggcgttacccagaatacaggcggctctgatacatcagcggcgatttccaacctgctgcttgccacaggaaactaccgccgtccgggcgccggagcttatccgctgcgggacataacaacgttcaaggcgcttgcgatatgggaactcttccaggctggcttccggggtatcagcatattaccgatgatgcggcacgcgctaaattcgaaaaagcttacggtgttgaaattgacggcaagccgggtcttgataatattgaaatgctccatgcgattgaagaaggaaacatgaaagccatgtatctcgtcggtgaagatatggcgctcgtcgattcaaacgccaaccatgttcatgacattttatccagccttgatttctttgttgtacaggatattttcctttcaagaacggcgcaatacgcggatgtcatcctgcctgcggttccatctcttgaaaaagacggaacatttacaaacacagagcgtcgtgtacaaagattgtatcaggcgcttccgacactcggcgatgccaaacccgactggtggattattcaggaggttgccaatcgtttaggcgctgattggaattacacgcatccaagcgacattttctcagaaatggcgagcctttctccgctgttcggaaaagcaagctacgacgttcttagcggctggaacagcttcctgtggggaagctttacgggagagagcactccgcttctttatgaagacggctttaacttcccggacaaaaaagcccgttttgcgctgagcgattgggtggagcctgccgtattccctgaagaatatgacctgcatattaacaacggacggatgcttgaacatttccacgaaggaaacatgacaaacaagtcaaaaggcattcagtctaaagttccggatgtatttgttgaagtatcgccggagctcgcggctgaacgcggaatttgcgacggaacaatgatccggctcgtctctccttttggggcggttaaattgaatgcgcttgtgacagaccgtgtccgcgcaaatgagctttatctgccgatgaactctacagataaagattctgcgattaatttcctgaccgggcctgcgtatgattcacggacacatacacctgcctataaacagacaaaagtccgcatggaagtgctcggttcctgtgatacaccgccgcttccgaaaacgaatccgcggaacaaaaaacgtcatccgcaaaacggtgtggaagctcagcgaaaatggaaccgtccgggctatgtgcacctaactgattaaggaaaggaggaaacataatggcaagcccaattactgaaattcaaaaagaaacgaaaacagaggaacagctgaaagctgaaaaactggaagaactgaagacgcttctcgcagaaaatgaagaagccgtcgcgaaaacgatgtccattatggcagagctgaatggcttgggcatttttgatgccgccggctatatgctccaggcaaaagaggagattgccaaaatcgcactcggacagatttcccgggaacctgtcaccaatctcctgaatacgatgatggccgcgggaggcgcgctgtcaaaagctgatcccgaatttatgggcagacttttagaaagcgccatggccgggacggaccaggcgcaaagatttttaaaagaggacaggaaagtcagtatgtttgaactgatgaaagccgtcggtgatcctgatattaaccgcgcgctcggcttcgggctgcagtttttaaaaggaatgggaaaagaattacgcgaaaccccttctgaataagaaatgaaaaagccattgtcaaaagacaatggctttttttattcttcggcctcttccagcctctttttataaataagtgaacggtcaacgcagaaataagcgcccgctaaaaatgcacaatccgttacaaacatcagcattttctggcccgcagtcagcccttgtccgggaagaaccgcgccgatataaatgaaggtgctgactgcaagcagaataaatgcgtaatgcttaaaatcttctattaatgatttcagtcttttcttctccatataaggtcacctgccagttttatagtctaccaacattataatacaagctgacagccgacagagaatgtaaatctatccattctttataaaagggaatcaagcgcctgtttcacatccgccgttaaatcctcagtatcctcaataccgactgagatccgtacaagcccgtcggtaatgccaagcgcaagccggcggtcgcgcggaatcgaagcgtgcgtcattctggacggcacggagattaagctttcaaccgctcctaagctttcagcgattgtaaacaggttcaatttttctaaaaacgcgtcgacgcgttcactgctgccgatatcaaaggaaatcattccgccgaaaccggagctttgcgcttttgtcagctcatggcccggatgtttcgctgatcccggatagtagagcgtctgaacggcatcatgcgcttcaagcagctcggcgattttcccggcgctgtgattgatggcatccattctgagtcccagtgttttaatgcctctcattaaaagccatgaatcctgcggtcctaaaacgccgcccgttgagttttgcacgtaatgaagcttttcaccgagctctttatcagccgtcacaactaagccgccgacgacatcgctgtggccgccgagatattttgtcgcgctgtgcagcacgatgtccgcgccaaagctgagcggctgctggaaatacggcgtgtaaaatgtattatcgacgataagcaatacgcccgcttcttttgcgatgtcagacatcagtttgaggtcagtcactttcaatagcgggtttgtcggtgtttcgatataaatggctttcgtattcgggcgaatggcctttttgactttttcttcactgctcgtatcaacaaagtccgcttcaataccgaagcggttcagcacacctgtcatcacccggtaagtgccgccgtatacatcatccgtcaaaataacatgatcgccgctgtcaaacagcatcatgacggcagtaatcgcagccatgcctgagccgaacgcatatcccgccgcgccgccttcaagctccgcaattaagctttcaagcgccgtccgcgtcggattggccgttcttgaatattcataacccgtatgctcgcccgctttcggctgccggtacgtgcttacttgataaatcggtacggaaaccgctcctgttttttcatctcccgtaattcctccgtgcaccatcagcgtttttttcttcatcttactgacctccttgaaaaatgtttttgcttatatatcgatcgctgccgtcagggaaaatagtgacgatatttgatccggcgggcgcttttttcgcttcttcaagcgctgcataaagagccgcccctgaagagcttccgattaagaggccttctttctcggccgcttctctgacaagcgaaaacgccgtatcgtcttccactgtgtaaatggcgtcaaaatggttctcgtccatataatcagggataaactccatgccgatgccttccgttttatgggcatgcggctctcctccgttcaggatcgagccttccggttcaacgatcaccgttttgacggcaggatttttctcctttaaataagctgccgtaccggcaaaggtgccgccggaacccgctcctgcgacaaaggtgtggatatccccgccgagcgcgttccatatttcaggtccgatcgttttatagtaagtcaatggatttactcggtttttaaattgcagaacggcataagaattattaatctctctctccagttcaagcgcttttcgaatggctccctgcataccttcttctctcggcgtatgcacgatgtccgctccgagagctttcataatttgctgcttttctctgctgaaatgctccgggacgcaaaaaacggcgcgaagctgatgctttctggcgcacagagcgagtccgatcccggtgtttccggcagtcgcttcgatgataacaccgcccggtttcacctttcccgtgcgtagcgcatcttcaatgagcattccgcccagcctgtctttaatgcttccgcccggattcatcatctcaagtttagcataaaccgctgttccctccggtatatcaaaatgcttgagacggagcagcggtgtatttccgatcagttctgtaatatctgttatcacgttcaatatatgtcctcctcctggaaaagcggaggagaacgagaatcccccgcttagtgaattcgtttgatgacattcaggacaagctcagttgaatgaacggcagcctgttctaaaaatttatcaaatgaaacgtcagattcttttccggcaatatcagataaagctctgatgacaacaaaaggcgttttgaactggtggcacacctgtgcgacagccgcagcttccatttcaaccgcgtacaaatccgcaaatttggcgcgtacgtcttcaacccgcttcggatcattcataaaagaatctcccgtagcgattgtgcctttggcgacttgaatgccgttcagttcagaaaccgcttcctcagtaatactgatcagcttttcatcagctttgtatgctgccggaagacccggcacctgtccgtattcatagtcaaacgccgtcacatccacgtcatgatggcggacatctgttgagatgacgacgtcgcctacattcaatgtatgatgaaaaccgcccgctgagcctgtgttaatcacataatcaggtttgaaacggtcaagcagaagcgtcgtgctgatcgcggcgttgacttttccgatccccgatttcagcaagataacttcgacgccttcatagctgcccgtcgtaaactcacagtgagcgatcatctcttgttttgcgtctttcagtttgcttcttaaaatcgtaacttcctcttccattgctccgatgactgccagtttcatttatacacaatcccttcgatttaccgtttaatcgcctccattatccagacaaagtcattttgctgcgtaaaccgcgcggcaaatccctcttctgaaaagatgtttttcattgtcccgagtgtcggataatgttccgtctttaaatcgtccgctaattgatgatagccgtttcggattgcttttttaattgtttcatcataagcttcatgatctttaaagacggtatcggcaaacactattttatcatgcttctgaaggattgtgccatattgctttacagccgcttgcttttcttcatcggttaaatgatgaaaggcgtacgagctgacgatggtatctatttgaaaaggcggagcgggaaactccagaaaatctccgtcactgaacacggctttgtcagaaagcttgtcagccgccagttttctcattgacggagacggttctacaccaaacacctttttgttcgcggcggctaatttcgccgttaaattccctgtgcccggtccgaactctaaaacgttagaacccgaaagtgcgacgatgctgtcaagaatattgtcataccctttaaaaacatcagcgtattgtttgtctgccccgtgcactgtggcatcataagtcgctgcccaatcttcaaataatggaataaattcacggcccatatttttcactctccataatttataattcctatgagtatagtatggattaatcgtggaacagttcctatcctatcacaaaaaagaatggaagggtactaaaatactttgggattattgcgcaattacggcagaaaggcttatactttcattgactcagaagaaaaatcaggaggatctgtactgatgaattttcaattggatttaatcaaagataaagtagaatttttcgaagcggcatctttgcaggagcttgaaaagaaaataaacgttcagattgaaaacaaccaggcgattatgcttcgcgtccgttctgtatcccatcaggtgacggccgttgacggcagaatcctttacagcgcgtcggtgcatttttcagctgacgtatgacagaaaaaagcagctgaataatcagctgcttttttgcggttattttaacgtttctacttttgtcggcttccagccttttttgtctttccaagtgatggtgacctgatactttttgccgttcgttttgtctaaaactttacccttcgcatcttgcgggcttccattgtttccgagccacagcactgtcatgtgatcttttgacacgcctgttgcgtaagagatggcgtcaagcatttcggaccagtcttcagagcttgagtcatacgtcgccgcatgttctcccgtctgctttgttccgaccgctttccattttgggttaacaattgttttctcaacatcgcttgatgagccgccctctgttatttttgcgcctttaaaaggatcgcttgaatcagagtcttttttgctgctgtcatcacttttcgatgaatcatcgtcttttttgctgtcagagtctgaagatgaatcagatgtgtccttatcctgtttatcttttttgtcatcgtctgatgccgtatcttttttgctgtcttttatgtcttcatcggatgtctgcttcgtcttgcctgatgcaggtgtttcctgcttctggctcgtgtccgctttttcgctcacgtcgctcgacggactgttgatgaagaggctgactgcaacgacgacaataagaatagatacgatagcaattaaaatgttaagcaccatatttgcttttctgcgcttatcacggttttcaaaacgagattgtttattgctcaatcattctgcactcctttatccctcttgctcagcatatattttaacatgggctgagcggttgttctatgtctgatttgtttcattttcatgtacctttttaacaatatcataaaacactgtatttgtcagagccttatcccccggcgtgtccatgtgcagcaccacgagagcgtatttcggcttgtccgcgggaaagtatcccgcaaaccatttgtggtaaagcgtctgtttttcttttgtgaacattcccgtctgggcagttcccgatttgcctgctatctcatacggcagatcctgaaaccttcggccggttcctttcggtgaggtgacgacttctctgagaattttttgaagctgctgcgccgtatatttgtcgatgttttccccttttaacggctgttctttgaatgacgccatcgtcgttttgtttttgtattcaattttgtccgcgattttgacttgttttttctcaccgccgcgcgcgatcgccgccatcatattggcgacttcaagaggcgtgactttcacgtttttttgcccgatcgccgtctgtgcgacggctttttttacggttttgtctttgtcatctccccaaatgaccccgcttttttcattatacagctgtctgaatccgtcttcccggtacagcttgccttcccagcccgcccgctgtgtgagacctagtttctccgccatgttttcaataacggaatcatcttttttgattaatttttccgcaagacttgtaaacgtataattgcagctttgggcaaagctttctccaaaactgagcgtgcctttatcatcccccggctctccgtacaggttgagattgcagttaaaggatgtgcccggcttcacttcgttttgttctattgcggctgcggcgatcaccgttttaaacactgatcccggataaatcggcgtcagcatgtaattttgcagtgtctgctgctttgacatgtcggcgtcaggctttgataccattccgagcacactgcttttttcaatgtctaaaaggacggctccccccttttttaacccgcggtctttcaatacatcttccattgctttttgaatattgcggtcgatggaggttttgacttgcagcggataaaacgcgtttgcttcagccgtatatttgacgtccattccgaataaagggtttccccttccgtcgacatgatacaaaagttttgtgtcctgatccgccagtaaaaactcatcaaatgtccgctccatcccgcttgtcccgatttttgccgtgatcggcagttccttcctgccggggtatttctttttcaaaagctcagggtcctggtttgtcgcgcccaacagatgagcggctatgtttgtttctttgctgtctttcatatatacgccgtaaatgccgggatatttcaaagaattgatatttgccacggattgtttcgtcaaatgttttatttttctgctgttcaggatcaccggtttttttgcttccgtcagcagctgcctgagctccccctgtttcattccgagaatgtctgatacccggtcaaccggccaatcctgcgtcacgagaaagggaaacagtatgacggcaggctgcttttttccggtcagttctttgccgttccgatcaagaaaagagccgcggccgtctgaaataaggacttcttccgtccgctgcttgacgctttcctgaatcagattaatattggattttgaaaaagattctgtaaaaaacagctgaatttcagccagccttgcaagcagaaagaaaaacacgagcagaaaacaaatcacggccgttttcagcctttttgatacgatcataaaaaacacctcatccacattttggacgaggtgtttcattgttaaacggatcttatgaaattttcacaattttcacgagcatttctccgcccggcgtctgaactgtcacttcttcgtccacttttctgccgagcaggctttttgcgattggcgagtcgtttgagatttttccttcaaacggatcagcttcagcgcttccgacaatcgtgtaagattcttcttcaccgtcgggcaattcgatgaatgatacggtttttcccaaaccgactacatttgaaccgccgtcgtcctcgatgattttcgcattgcggatcatgttttcaagcgtcgtgatgcgcccttccacaaatgcctgttcttcttttgcggaatcatactcagagttctctgacagatctccgaagcttcttgcgattttaatgcgctctactacttctttacgtttaaccgttttcaattgctctaattcttgttcaagtttttgttttccttcgtgagtcatcggaaaaactttttcttgtgccatgttccttcactccttggtggttgtccctcaacaataacgtgtgattatgtatgagagcataaacgaaaaaatcaagaatgagaacacagggcagtcctcgttcttctctcccatataggtactgtttatcttaaactgaatgtgtgttttctgcaaatgtttcggtttataaacagggaaagaagggaactgtctcattcccttccagcctatacataatatggtctgagttatttatgtctatgctatggtattacaaaattgcattttgttcaaggatcgtttgaatcttcgtgaccatcagatcaattgcgacgtggttttgtccgccttccggaataatgatgtccgcgtagcgtttcgtcggttcaacaaactgattgtgcatcggtctgacgacggacacatactgctcaatgacagaatcgattgaacggcctctttcgttaatatctctcataatccgtctgatgatacggagatccgcgtccgtgtcgacataaagtttcatatccatgaggtcgcgaagtcttttatcttcgagaacgagaatgccttccagaataatgacatccttcggctcaaccggaatggtttcctcagaacgcgtatgcagtttataatcataaatcggcttttctatcggccggtaattcaaaagctcttgaatatgctcgattaaatagtcattatcaaatgcgagcgggtgatcatagtttgtgttcagcctttcttcaaacggaagatggctttggtctttataataaaggtcttgctggatcattaaaatcgagtgtcctttaaactgttcatagatggaacgggtgacgcttgtttttcctgatccggaacctcctgcgatgcctataactacaggactcttacccattggtgattacttcccctttctcatcatgttgctcggataaatctttttgtctactttaaatctaacgatttgcaggggatggcgggcagcatcaagctcgtttccgtcttcgtcccaaatagtgccgattgtgaatgtgaaattgtcgatttcaggaccgaaaaattccacttcgtcaccttgtttaaagaaattgcgctgctggagcgtcaccatttgagtttcctcgtcatacgcgagcacgagaccggcaaaatcaaatgttgttttctttccgtgttcgccgaacatctgctcttcatacccgggcgtgccttcaaagaaagcaggcgcggtatcccggtttgcacatttgtccagctcatccagccattctttttgaatgacaaagttttcaggatcagcgcagtatgcgtcgatgactttgcgatacacgctgacaaccgtcgcaacgtaatgaatcgatttcatccggccttcaattttcaggctgtcgatacccatctcaatcatttgcggaatggattcaatcaattttaaatctttcgggctcatcgcaaacggagcgtcttcttcgtcataaagcgcgaccgcgtttgcaccgtctgtctgatacaggtcataatcccagcggcaggactgacagcagccgccgcggttggaatcccgggctgtcatgtgattgctcagcacgcatcgtcctgaataagcgatacacatggcgccgtggataaaggtttcgatttcaatgtccaccttttccttcatttctttaatttccagtccgctcgtttcacgggcaagcaccacgcggtcaagcccttcttctttccagaactgcaccgctttccagttggaaagggactgctgtgtgctgaggtgaatttctacgtccggggccactctccggcatgtttcaataatcagcggatcagcgacgataattccggcaacttttgcgtctcccaacgcttttaagtattcttccagaccgtccatattttcattatgggcgaaaatgtttgttgtcacatatatttttgccccgtattttttggcaaattctacgccctctgcaatttcttctattgagaagttatccgcatttgagcggagtccgtattcctgtcctccgataaaaaccgcgtccgctccgtaatgaacggcaatttttaatttttcaaggtttcctgccggagcaaggagttcaggttttttcgtaatgacgcgttttccgtttacgactttggaaatggtttgatttacggctgtcatccgttgcaccctcctttttaatagaccgtttctttaaagaagaatcctgtgtcgatgcttctgttcacaggctgaatgctttcaatccgctctatccagctctcttttttctcttcgtatgtctctcggctttcgaagcacagatcgattgcttctctgtacatgcgggtcacttcagttaagtattcaggagacttcaaaactccgtcgattttgaaagaatcgatgccggcgtccatcaggtcctctaattcatcaatcatgcacacatcgttcgggctcatgatgtgcgtgccgttttcatcttcaaaaatcgggtatttattgccccgttccttgtcatgcagaaacattcccgcttcttttttcttctgttcgatgtccatgacttttccctggtattcgaagtaatggcccactaaagaacgctttgattggaacatgcacgtcatgccgtggatttgaatttcaatttcaacttcggcgttttcttttatgtcaatgatgctgtccatatttaattccttagccagcactgcccgccgtgcgcctttgcgtccccagtaattgcaggaatagtagttggtacccgttgtttccgtgctccagtgcagtttaagatcgggagccgcttcacgcgccgccattaaaacggccggatcaccgaaaacagccgcatcaacgccggcctcctgcaaaaaggcaagatagccgttcagctcgtccactttttcgttgtgaaaaatagcattgacggcggcgtacactttcgcgccttcctgatgagctgtctttacggcttcttttatatcttctcttgaaaattcaccggccagtctcaggccgtatctctgttctccgactaacagggccgttgcgcccgcttgaatgagcggaagaatatcctgtacagaagtcggagtcaccaaaagttcaggttttttcatgatcattcacctcttctttttactgatggcgatgccgtctccgaccggcagtatgaccgtttgatagtcaggccggttcatcagccattggttatattgatcaattttttcaacaagcttccgtcttcttttcggctcaatgtccgagtgattttgtgccaccagtcctttaaacagaacattgtctgtaaaaatgactccatccggcgcaagcatcggttcatagagctcaaaaaagttcgtgtactggcctttggccgcgtcgataaaaatggcatcataaggagccgtgacacggacagactcagaaagttccagcgcatccccgtgcattacgtgaacccggttttccatttcaaagtcttttatattgttcacagcttcttcatagcgtttgtcgtcccgttcaatcgtgtaaatattcgcatccggaagctcaagcgccatccgtatggcggaatatccgattgccgcgccgatttccaaaatgtttttcgcctgttgaatcgacagcatttgaagcagcacttcaatgcccgcttcttccataatcggaacatggtgctcttttgcataggcttcaagctttttcactttatcaggccgaggcttcagcatcgcgtttatatactcgtttatttgttcataccgatcattcacggcaaacagcctccgttctaaaaaggagtgcccctgacgaatccgcggggacactctcttaagacacttctttatccataagtaaacaacccgatatattttatcataaaacctttcagaatggaataaaaggagagcttttgccctccttttattcgctgtcttttttggaaatatacttttccttcgctttattatggtcttttaatgttttggtgaaaacgacctcgccgtttggttttgcaaggaaatagagataatccgttttgtcagggcggagagccgcttcccatgatgaatcaccggcatttgcaatcggtcccggcggcagccccttatgtttatacgtattaaacggagaatcaattttcaggtctttgtagtagacccggcttttatgcttaccggccgcatataataccgtcgggtcagtctgcagcggcattttttctgcaagcctgttgtaaaaaacgctggcgattttgtgacggtcggctttggcggtggcttcttcttcaataagcgatgccatcgtcagcgcgttatggacggaaagtttctttttttccagttcagatttatacgtttcgatacgggtatttgtttcctgaaccattgccgtcaaaatcgtgtcaagcgatgcatccggatcattaaacggatatgtggccggatacagatagccttcgagcggatgcttgagcttcttgtttgaaagtgcgtccgttattgtatcaggaaactgttttttcagtttgccgatgaatgttttgtcatccagttttgccatgatctcttcttttgaatatgatgtttcttttgcgatcgcatccgcaatctgtgtaagctgttttccttcaggaacggagatctgaaaggcatatcccgttgatcccgcggtcagttttttgataatcgcatccgcatccattcctttattcaggtggtaaaatcccgcctgaaacccggaagcgcctttatacttcacatacagctgaaatgcttttttgcttttgatgacatgctgatcctcaagaatttcagcgattgccgaaacggaagaaccgctcggaatattaatattgactgccgttttgctgcctttgtcaaccggggacagcagagattttccatagaaaaaagcaccgcaaatgatgataagcagagcgatcacggaggacagtattatcgttgtttttttgtttttacgcggaaatgaatttttagtctgattgatattcatacaagtattttcctcccaacagctcttatactacatgattcatgtgcattcggcaatttattacaaaaaaaagccgaagcgcatatgcgctccggctttttccgttcattttattcttcgtcttcttccgctaaaaacgtgttcagcgtttcttcgatcatttcccactcttcatcggtttcaatcggcatcagttcgccgtcttcaccgttttcgttcggttcgaagcttgaagcgtgaatttcaatttcatcatcgtcttgagcatcaatcggataataaagtacgtaagatttgttgaatgtgtcgttttcaaatgtgaacagcacttcgcaaagctgttcgttgccttgatcatcgacaattgtaatatgtttttcgccgtgttccatttctttcacctcttagtttaaactgtccagatatccttgaaggatcatgacagccgccattttatcaatgactttttttcgtttttgcctgctgacgtcagccgcgatcagcattttttcagccgccatcgtcgtcagacgctcgtcccacagcacaacagggacattgtacgctgtttcaagcagtttcgcaaatgtttggctggcttcgcctctcggaccgatcgtcccgttcatgtttttcggaaaaccgagcacgatcttctctacattatagtctttcatcagctcggataaacggtccagaccgtaatctccttcagcctcgtttatttttatcgtctcaatgccctgagcggtccagcccatttcatcgcttaaagctacgccgagtgttttcgttccaagatcaagtcccaatattctcatgaatgtatttacgcctctttatgctgttctagataggattttaccaattcctcgattaattcgtcacgttccagtttgcgaattaagttccgggcgtcgcgatgcctaggaatgtatgcaggatctccagacagcaagtatccgacaatctggttgataggattgtaccccttttcctgaagcgcatcatataccgtaatcagcacttcttcgacgtttgtttcagcagaatcatcggagaaattaaatttcatcgttttatcaaacgagctcaccgttttgcacctctttcccaaattcgcaggcaaagttcagcctgaggtcctcatcttatcatcattctacactagttgaaaggattataaaacggattttatccaatcttccgcagatgcgagcgcctcttccaatttttcaggctgctttccgccggcctgcgccatgtccggacggcctccgcctccgcctccgcagacttcagccgcttgtttgaccattttgccggcgtgaaggcctttttcaatcaggtctttcgtcacgcctgctgaaaggttgactttctcgttttgcacggcgccgagaatgatgaccgcagaaccgagcttcgctttcagatcatccaccatagtacgaaggtggttcatgtctttcgcatttactttttcagccagcacttttacgccgccgatgtcttttacttttgacagaatggctccggcttccacattgccaagtttgctgagcaatgattcattttctctttgcgcttccttcagctccgcttgaagagactgaattcgcttcggtacgtcttttacgtttgatttcagctcatccgcagcgtgctgcagaaggctgagctggctgttcatttcctgataagcgccttttcctgttacggcttcgattcttcgcgtacctgcgccgatccctgattcggatacgattttaaacagaccgatttcagccgtattcgtgacatggcatccgccgcaaagctcaaggctgtaatctccgacttgtacgacgcggacgatatcgccgtatttctcgccgaacagggccatcgcgcccatttctttcgcttcattgatcggtttcaaatcaatcgctaccggaatgctctcccagattttttcgttgacgattccttcaatgcgttcaagttcttctttcgtcacttgaccgaaatgagagaagtcaaaacgcagacgattttcggtaacgagtgaacccgcttggttgacatgtgtgccgagaacgtctttcagcgcctggtgcagaaggtgggttgctgtatggtttttcaccacaccgcttctcatttgatcttcaacttcagccgtcacgcttgcgcctttttgaatcgtgccgctatccaccgtgccttcgtgtacatgctggccgttcggagcttttttcacgtctttaatggttacgacagcctgctcgcttctcagcactcctctgtcaccgatctgtccgccgctttcagcatagaaaggcgttttgtcaagaagaatttggacggtatccccttcatgcgcctcgctgattaattgcccgtcatgaagaagctcgatcaccttcgcttcagcttttacggcactgtagccgacaaatgtgctttctgcggtaatgtcgcgcaatgcgccgccctgcacctgcatgcttcctacatcttggcgcgcatttctcgcccgttcacgctgtttttccatttcggcttcaaagcctttatggtcaaccttcatttgctcatcttccgcgtattcctccgtcaattcaaccgggaatccgtacgtatcgtacagtttgaatacgtcttttccggagatgatgccgctgcctttttccttctctttctttatcacgtcagataaaatggccagaccttcgtttaatgtttcgtggaagcgctcttcctccgttttgatgactttggcgataaactcttgcttttctttcacctccggatagaaagcgtccataattcctgcaacagtcggtaccagctcgtacataaacggacggctgataccgatggttttcgcgtatcgcactgccctgcgcaagaggcgtctcagtacatacccgcgcccttcatttgacggcagagctccgtcgcttaccgcaaatgcgaccgttctgatatgatcggcgatcactttaaaggccgtatccttcattgcgtcctttccgtaagcatctccggaaatgcgctctgttgcttcaataatcggcataaacaaatcagtgtcaaagtttgtcgggacatcctgaatcacggagaccatccgttcaagccccatgcccgtatcaatgtttttcttcggaagcggtgtgtacgtgccgtccgggttgtggttgaactctgagaataccaggttccatacttcaagatagcggtcattttcgccgcccggatacaattcagaatctgacgggtcattaccgtatttctcgccgcggtcatagaaaatttccgtattcggtccgctcgggccttcgccgatatcccagaagttcccttccagacggatgattctttcttccggaacgccgattttttccgcccatagcgtataagcttcttcatcctcagggtgaaccgttacagacagcagctccggatcaaagccgatccacttttcgctcgttaaaaactcccatgcccacgtgatggcttcttctttaaaataatcaccgatggaaaagtttccgagcatctcaaagaacgtgtggtggcgcgccgttttccccacattttcaatatcatttgtgcggattgatttttgcgcgtttacaattctcggattctccggcacaacgcggccgtcaaagtactttttcagcgtcgcaacgccgctgttgatccacagtaaagacggatcttcatgcggaaccaatgaggcgctcggttcaacggcatgacctttttctttaaagaaatctaaaaacatttgacgtacttcagcagaagttaagtgtttcatctatattcctccttatcactacccgaaattctcttttgcgacagcaaaaaagctctctccctatgcaaaccatgcgttcacacagggacgagagctgtctcgcggtaccaccctgattacaggccgaaaaaggcctgtcacctttcatcccgtaacgcaggattgcggcagcctttaactgcactcaggattagcttcggccgatcttctgctgaagctcctctcagcgtatcggagcttctctcttaaacagggcttcggcgtactcttatccgtcactcgagattcgtatgtattctactcgaaattatagacaagcagaacccgaatgtcaatgttccgtcctgatccgcaaaaagtgaatggccgtcacttttaaaacggctgccgccggaacagcgagaatcatgccgggaatgcccgcgagctctcctccggcaagaagcgcaagcatgatcacgacggggtgcattctgagacttcgcccgacaatgagcgggctcaaaatgtttccttctataaattgaagaataaaaatcgtgacgattacgatgatcacagccttggaggaaatcgccagcgaaaggagcagcgccggcacagcgccgataaacgggccgaaatacgggatgacattcgtaatcccgatggcaaggcccaaaatcagcgggtaaggaagcccgaagagccaaaatgaaacgccggctattaacccgagcaaaaaacaaacgagaagctgaccgcggatgtaatcaccgagagagtcgtccacatcccgcagaaattcactccccctttttctccaggacttcggcgtcaaataccagaccgtctttttcatgacgcctatatccttcaccatatagaacacgagaaaaggaatcgtcgccgcgatcaggatataatcaagcacgaaacggatgcttctgatcgtgctttcaatcgtgccggcaagaaacgtttctgtctgctgaatcattttgtccatccgatggtgcatgccgtcaggccaatgatccgtgtgattatgcagatgcctcagcatgctgttgtagttttcggcaagaccgggaatgctctcagacagatcctgcagctgttcaattaaaacaggaacccctttataaaccccccagccgattccgccgaaaaacaggcaataaatcagaagcaggcttaaagttctaggcatcccttttctatgaagccattcagtaatcggaagtaaaagataagcaataaatactgcgatgaatataggaataaagagagattttataacaagccaaatgggagaccataacatatcgagcatgcaaaagacatacactgttaacaaaacgagcagacatacagctgtccacattaagagctgcagcggtttttgaagcatgacgtttcacctcttgctttatcttttgacagaaagccggaattattcccgtttcataaactacgccttatgacgcagacctcttgacggaaataattatcagaaattacgaaataatctaaataatattcataaaagtctgtataaccatcgtaatgtgttaaaggatttcaaaactgtccagtcaatatgactcatgtttttttaaggaggatggccatgatttcatttcaggatgtaaataagcactacggacatttccacgtgctgaaaaacattaatctgcacattaaaaaaggggaagtcgtcgttatcatcggaccttcaggatcgggaaaaagcacgcttctccgctgcattaatcagctggaaacagttgatggaggcgccttaacggtaaacggcgtctccatccgtgacaagaaaacggatataaatcaggtccgccggaatatcggcatggtgtttcagcattttcatctgtacccgcacaaaaccgttctgcaaaacatcatgctcgcaccgatcaaagtgctcaagcaatcaaaagaagaagcaaaggaaacggccttatactatttgaaaaaagtcggtataccggacaaagcggacgcttatccttcacagctttccggcggccagcagcagcgtgtcgccatcgccagggggcttgcgatgaagcccgaaattatgctgtttgatgaacccacatccgcgcttgatccggaaatgatcggggaagtgctggatgtcatgaaaacactcgcaaaggaaggcatgaccatggcagtcgtcacacatgaaatgggattcgcaaaagaagtggcggaccgcatcgtgtttatcgacggcggatccatcttagaagaagctgcaccggctgaattttacgaaagcccccgtgaagagagggcgcgtttattcttaagccgtattttaaatcactgaaaagaaacggaggagcgcttatgtcacgcgcaacaaaatggttgtcattcggattgatatcactgctggccgtctttatgctggcagcctgcggagggaaagaaacgtccggggattcaaaaggaacgggaaaagacacgttagcctctattaaagacagagacaaaatcatcttcggcgtcaaaaccgatacgaggttattcgggctgaaaaacccaagctccggtgatattgaaggcttcgatattgatatctcaaaacagctcgcaaaagatattctgggggatgagaagaaagcggaatttaaagaagtgacgtcaaaaacgaggattccgatgctgcaaaacggcgatatcgacgccatcaccgccacgatgacgataacggatgagcggaaaaaagaagttgatttctcagatgtttattttgaagccgggcaatccctgctcgtcaaaaaaggaagcagcatcaaaagcaccgaagacctgggaaaaggctcaaaagtattggcggtaaaaggctccacttcctcacagaacatcagagaaaaagcgcctgacgcctcagtgctggaatttgaaaattacgccgaagcgttcactgcgcttaaagcgggacagggagatgcgctcacaaccgataatgcgattttatacggcatggccgatgaaaataaacaatatcagctgacgggcgaaacctttaccgatgaaccttacggaatcgccgtcaaaaaaggccaatccggccttgtcaaagaaatcaacgcctctttgaaaaaaatgaaagccgacggcaggtacgaaaaaatctataaaaaatggataaaagaagaaccggcaaaataggacggaccgcgggatgagcatgcatgctcatccccgttttataaggagtgacatagatgaacttttcaattttaacggaaaacttcgatatgtatatggacggtttcctgcacacattgcttgcgagcttcatcgcgctggcaggcagctttgcgctgggcgttctgatcgcagtcatgagaatcacggctttcaaaccccttcaatggatcggcactgcgtatgtggaatttatccgtaacatcccgcttctcctcatcacattcgttttttatttcggacttccgaacgccgggctgagactggacggctttcaggcgggaacgattgcgcttacgatttacacgtccgcctttatcgcagaagccatcagagccggaattcagactgtccccaaagggcagatggaagcggccagatcgtcaggcttcacctacagtcaggcgatgagatatatcattcttcctcaggccgtaaaaatcgtcattcccccgctcggaaaccaatttctcaaccttgtcaaaaactcatcaatactcggagtggtggcgggactcgatttgatgtatcaggcggatctcgtgtcctcgagcactcttgtcgtgtttgatgtctatattttcgtcgcgcttttttatttgatattaacgatcccgctcagcatcggggttcactatttggaaagacgtctcggaaaaagttattagagaaggagagtgaataacatggattttagcggcgcctatacacctgaccatctgctgtttttatgggacggctttttggtcacactttatgttgcgctgatctccattgtcctgagttttatgttcgggcttgccgccggcactttgcgctatgcgaacattcctatcgtctcgggcattatagcggccattgtggaaaccatccgcaacctgccgctgttattaatcattttctttacgttttttgcccttccggaaatcgggatcaaactggaaattaccgcggccgccatcacggcgctgacgatttttgaatcggccatgctgtcagaaatcatcagaagcggtttgcaatccgttgacaaaggacagattgaagcggcgcgttcttcaggactgacgtacacgcagactctttttctcgtcgtcatgccgcaggcgctcaggcgtatggttcctccgattgtgagccagtttatctccttattaaaggatacgtcacttgcggtcgtcatcgctctgcccgaactgattcataacgcgcagattttaaacggacaaagcgctgacggggggtattttttcccgatctttctgctggcggccctgatgtatttcgcggtcaattacagcctgtctctcgctgccagacggctggaagcgagacaaacgtaaaaaggatacttccggagaagtatccttttttccgcttaaaacattttcatgactcgtcttctcatccgtttcataccttttttattcagcatatcggactgagaagccatacgatacataacggctccagcccctaaagccaacagagaggtcattgttctgcccatcgcgcgtatctcctttcaactttaaaaattgatactgcgttcgtcttcagaaaacaaatcatcaagactgcttaacgtgccgtcttcctctacttgatgtgtcgcaattttgcctttggccaccgtcagctcaatgaagcagccccagcaatagtattggtttacgccgattttgccgatatctttacttttgcagttcggacatacaagcacagactacacctcttatccgttcaggacgatgccttctttccccgcttcaataagcatatcggcggcgcggcgcacttggcgtctgccagccagatctgaaaagaagccgtccgagagttcatatgctacgattatgcccctgtccaaacaaaagtatacatcttccagcaaaccgaacatttcaccatcaggcgatttcaccggctgcattttaatctgttcaaaggtgaaacagctcttcggcaaaggctgcaaatgagcatgaccggcagctacggcttcttgatccatctcttttatatcacttgcccctaaaaaaagatgacggttgtgaaacaggcgtttctgctccagcacgaaaccgagaaaccggccgtccagagagaaacatacatccgatatcatcccgagactgcgcccggtgttttcgtcatatactgttcgtccttcagctgcatggcatgttctcaaagtgtgatcaaccaccttttgttgaacacgtataggttttgccaagaagccaggcagcatactttgaaatgacttccacaggcgaaaacccggcgcatgaacatgtgccgggttttatttacgctttttcttccataaagtcaaaaggcgtgatgccttccattccgatgttcgcatcatatacactgaacggcagctctttttgcagggcggccagttctgcatccatctcttcagtctgctctgtgagcctgtttttaagcgacgtctgtctgacggtggcatcattgtttttgacgccccattcaagcgcttcttcttctccgcaaagaatcagaaattttttcgctcttgtaatggcggtataaagcagatttctcctgagcattcgatagtagcctttgacgacaggcaggacgacaatcgggaattcgctcccctgcgacttatgaatggaacagcagtaagcgtgggtaaactggctgaaatcctttttcgtaaaggtgatttcgttgccgtcaaacgagacgacgaccatgtcttctttttccgtattttctttggcataaaaaatggacacgatttcgccgatatcgccgttaaacacattgttttccggctggttgacaagctgcaatattttatcgcccgtcctgtagacgacatctccgaatttcagctcccgccttttttctttaggcggattcatgatgtcctgaagaagcatattcagctcgttaattcccgcttttcccctgtacatcggggcaagcacttgaatatctctggaggtataccccttttttaacgcattcgagacgacctgatccacgacttctttaatctgtgaagaattacagcggataaatgagcggtcctttgtcggcgcggtcagcccctttggaagcagtccttttttcatatcatgggcaagttccacaatggatgatccttcagcctgacggtaaatatctgtcaggcgcacggtcggcagcacttcagaagccaaaagatctctgagcacctgccccggtcctactgaaggaagctggtcttcatcaccgacaacaatgagctgaatgtgcttaggaagcgccttaaacaaatggctggcgagccagatatcaagcatactcgcttcgtctataatgatcagtttcccttcaatcggctgatcttcgttgtaggtaaagccttcagcgccattccagccgagcagcctgtgaatcgtaacagccggcagacccgtagattcgctcatccgttttgcggctcttccggtcggcgcggcaagcagcaccggaaacgcctcgtcttttttataatcaccggggtcaagggatacgccgtgcagttcactgtataattccacgattcctttaataacggtcgttttccccgttccaggtccccggtcagtaaaagcatcggtgaagacagcgctttttgaatggcatccttttggcttggtgcgtattgaacattcatccgttcttccagttcaccgagtgcaagcagaaattccgattcaggaaattgatcggcatactccgtctgagccgcaatgtcgagcacgcgttttgcgacgttttgttccgcgtaaaacaaggagggaaaatagcagcgctctccttcgatgacgatatccttactctccccgagggcgatgatgccgtcagccgcatccatttccgtgacgcggccgccttcagctgactgattcaggagcgtttgcgtattgataatcagctgctttgtctctatgtacgtatggccctctgaaagacaggtcgattcaatcgtatataagattgccgctttgatccgctccgggtggtttcctgacagacccatttttccgcccagctcgtcagctttcacaaagccgatgccttcaacgtcttttacaagctgataaggattttcctgaattttctccaaggtttccgtttcgtaggcctgatatattttcatggatagctggggcccgaaaccgtattggttcagagagatcataatctgttcaagcccctgatgccgctgcagctctcccgccagtttgtccgctttcttttttgacattttcggcacatcataaagcaccgacgcatcagccagaattttattgagcgcgccgtctccaagctttttgacgatttcttccgccgttttttttccgattccttcaaacagatcacttgataaatagtgaatgattccttcttttgtggtcggaatttcttttttaaagtgttcagcctgaaattgcaggccgaacttaggatgcgtggcagtttttccgtaaaatgtgtaggtctcatcttcttgcagcagagggaagtagcccgttacggatacgaccttgtcttcgatcgcctcagacgtttctgcaaccttgactttcagcactgtatacaggttggtgtcattatgataaatgaccgtatgaatgacgccttttacatacggctgttcttcgatgttcagctgatccacgagccttccctccttttgttatgactgggtgataagctgtttcgcatgaagcgcaagcatatgatcaggctgtatgccgattgcgccttccagcatctcaagcgccttttcacgattttctttgtacgcgtaagcgaccccggcattataaaatgcgtccgcgtggcctggatcctgctcgatcaccgtctcaaactgcgcaagagcttcatccagcatttcttcatttgcaagacacattccgaactggaagcgcgcttccgtgtcattttcgtttaattcaacggcacgctgcagatacggcagtgcaagcttcggccgctctaatttaacgagaacggtccccagcatataaaacaaatctccgttttccattccggagcgaagcgctttttcaaacatatccttcgcttcggaaaacgattctttcatcacatatacgtttcccgcaccgtaataagcggctgccgccgaattgtccaattcaagcgctctgttatagaatgcaagcgcccgttcgagttcgttcacagaagaaagcagatttgcgaagttgatgtacggcaccgggtcttggccgttttcctcaatcgctttcgtaaaagcctctgccgctttttcaaaatcgccctcctgcatggcgtcaatcccgattttattataatccatttttaacttcctttcgctaaaaaaccccaacatgcgagttgaggttttttacatgtgttatacgtaccacagttttgttccgtctttataaacgtcatctatcgttccgccgccgaggcactcttctccgtcataaaaaacgacggcttgtcccggcgtaacggcgcgtacctgcccgtcaaaaatgatttccgcttcatcatcacccgtcattttcaccgttactttgtgatcttcctgacggtagcggaatttcgccgtgcatgtcatttcgccgccgtccatcagaccgggacgcgtccagctgacatttgtcgccgtgatcttatcggaatacagaagcggattatggaatccttgatcaacatacagaatgtttttttcaagatctttaccgacggcgaaccacggctcgccgcttccgccgattccaagaccgtggcgctgtccgattgtataatacatcagaccgtcatgacgcccttttatttctccgtccattgtcatcatatcgcccggctgagcggggagatattggctgagaaacgttttgaagttgcgttcgccgataaagcagattcccgtgctgtcttttttcgcagctgtcgcaagttctgcttctttggcaatttcccgcacgcggcttttttgcagatcaccgatcgggaacatgactttactgagctgttcctgattgagctgattcagaaaataagtctggtccttgttttcatccagaccgcggagcatgcgcactgtatctgcgcttctgtccacgcgggcgtaatggcccgtcgcaagataatccgcgccgagtgacagagcatgatccaagaaagccttaaacttaatttctttattgcacatgacatccggattgggggttcttccggctttatattcatcaaggaaatattgaaataccttttcccaatattgcttctcaaaattgacggcataatacggaattccgatctggttgcagacccggatgacgtcttcataatcttccgtcgccgtgcaaaaaccgttttcgtccgtatcatcccagtttttcataaagattccgattacatcgtagccctgctccttcagcagaagggccgccacggaagagtccacgccgccggacatgccgactacgactcttgtatcctccggccgtttttccatttgcattcactccattaaaaacataagtccgccgttttaagcaagccgtttaacgacggcggcaagcttttcggcggctgtttcgatttgttccgccgtattgccgaggccgaagctgaggcggattgacgaagtcagcctgccgctctcacttccgaacatggccgtaagcacatgggacggaagaacggatcccgccgtacaagcagatccgctggagacggcaatgccttccatgtcaagattgaccagcagcgcttccaccggcacaccgggaaagtaaaggtttaaaatatgaggcaggcatttctcggcatctccgttcacctccgctgtaacgccggcttcttccagcgtgctcatgatgatgttcttaaactccttatacttcgctgttttctcttccctctcacggtttgaaaggacgaccgcttcttttaagccggcgatgcccggtacattttccgtccccgcgcggcgctttcgttcctgctctcccccaagaagaatcggtgacagcttcacctcttgatttacatataaaaagcctgtccctttaggcccgttaagcttgtgaccggaaacagacagcatgtcaattctgctttttttcacatcaatcggcatataaccgaatgcctggacggcatctgtgtgaaaataggcctgatgcccgcttaacagctctccgatttcgtcaatcggctgaatggttccgacttcgttattgccatacatgacggtaacaaggattgtatcatcacggagcgcttctttcacctgatttgcactgatccgtcctgaagggccgggcatgaggtatgtcacctcaaagccgtcttcttccagcttttcgcaggcgtgcaatacagcatgatgctcaacagcggtcgtaatgatatgctttccttcattcttccgggcggcagccgttccgaaaatggctaaattatcagcctccgtaccgccgcttgtgaaaataatttcctgttctttcgcactgatttcgcgcgcgatgtccgctctcgcttcatcgacccatttccgggattctctcccgaatgaatgaatgcttgacgggttgccgaaactgccgaagaaatggggcttcatttcttcgagcacacgttcatccatgggggaagtcgcagcatgatctaaataaatccgttccattgtctttacacctctggtttaaatatagaacatataagcttcctgctcgccgtccgtgtagctcgcaaggtcttctaacgtcgtgctgtccagcacgtcttttacagcgtcgcggatgcggatccataactcccgcttggcaggctcttcatcctcaagcacttctaccgggctgatcggcccttccagcactctgataatatctccggccgttatctcttcaggctggcccccgagcacgtaacccccgtaagcgcctctgatgctttttacgagtccggcgtttctgagcggtgatacaagctgttccaagtaatgctcagaaaggctgtttgtttgggcgatgcttttgagcgacgtcggaccgtctccgtgctttttcgccaattcaatcataatggtgagcccgtatcttccctttgtcgatattttcaatatgaacaccccagtcaattctaattgttaatttatacaagtaaatggatatgaataatctgtttagtatcttatagaccaactgttattataacataacttatcctaattttcattgaaacacggggcccgccgcaattcgcttttctaatcgtccgttttccgttaccctgtatatgtaaggagagatgttcatgaaaccattggcgtatcggatgcggcctgccaatatcgaagacattatcggtcaggaacatttggtcaaagaagataaaatcatcggcagaatggtgcgtgcgaagcacttatcatccatgatcctgtacggaccgccgggcatcggaaaaacgtccatcgccacagcgatcgcaggatcgacaagcatcgcattcaggaaattgaatgccgtcattcataataaaaaagacatggagattgtcgtacaggaagcgaaaatgtcaggccaggtcattttaatccttgatgaagtgcacagacttgataagggaaagcaggattttctgctgccctatttagaaaacggcatgattattttaatcggcgcgacgaccgccaacccttatcatgccattaacccggccatcagaagccggacccagatatttgagcttgaaccgttaacacccgatctgatcaggcaggcattgaaaagagcgctcacagatgaacaccggggactcggttcctacagcgtttcggtggacgacgacgcgatggatcatttcgcacaagggtgcggaggagacgtccgctccgctttgaacgcactggagcttgccgtgctctccacaaaggaatcaagcgacgggacgatccggattacacgggaaacggcggaagaatgtctgcagaaaaaaagctatacccatgataaaaacggcgatgcgcattatgacgtcttatccgcgttccaaaaatcgatccggggctcggacgcaaacgccgcccttcattatctggcccgtctgatcgaagccggagaccttgaaagcatatcaagaaggcttctcgtgatcgcctatgaagatatcggcctcgcaagcccgcaggcaggcccccgggtgctgagcgcgattcagaccgcagaacggatcggctttccggaagcgagaattccgctggccaatgcggtaatcgaattatgcctctcaccgaaatcaaactccgccatttcagccgttgatgaggcgctcaaagacatcaggacgggtaaaatcggcgatgtgccgaaacatttaaaagacgcccactataaaggggcccaagagctcggacgcgggatcggctatcaatatccccacgatttcgagaacggatgggtcgaacagcaatatttgcccgatccgttaaaaaacaagcaatactataaaccgaaacaaacggggaaatttgaagccgccataaagcaagtgtatgaaaaactgatgaagcagaaaaaataaccggacaagatctttcgtgtaaacggcggattcaaataaaaaaacagcctttcctgaagaaggctgtttttctttttacttatctttaacccgtttaatgtcgatgtcctttaagagctccatgacaacatgtccgcccataatcagaccggccactgacggaacccaggcgttggaagacggcggcatttgcgctttgcggattttcgcttcatcattcccgacttcttttctgacgtcttcacggatgacgatcgggctttcatcagaaaaaatgacctgtacgccttttttaatgccctctttacgaagccttgtgcggacgactttggcaatcggatcagtatgggtttttgaaatatcagcaatctgaaagcgtgtcgggtctgttttattcgctgctcccatgcttgaaatcagcggaacattccgtttcagacattctttcatcagatgaattttataatgaatcgtatccgacgcgtcaatgacgtaatcgagcggatactcaaagaactgctcatacgtctcttctgtataaaacatttttaaggcgacgacgtcacaatccggattaatatcagcgatccgctctttcatcaattctgttttcggctgtcccaccgtcgacaatagcgcatgcagctggcggtttacgtttgtaatgtcaacatcatctttatcgacaagcacgatccgccccactccggacctcgccaatgcttcggctgcgaatgaaccgactccgccgacgccgagaacggccaccgtgctgttttttaacgtgtccagcccttcttttccaatcgctagctcatttctggaaaactgatgtaacaagaacctcactccacattctggttttataaactcggcttgtcaaaaagccgctggttttagcgcacaaaaaataaagtcccaattgtgccgttgcagctttccttcgttttgaacccgctctcagcaggtgggtgcccttttttaaatcttgtaagtcctctttagcgaatgaaaagaggcatgtacgccatttaaaaatgcgggctcccaaatcaaaaaaatgttcggtcaaaactaggtgtacaactaacacatcaggactttatttaacttgtcaaaatcatatcacagcagattttgattttcaagaaacaaactgccgatctttactgtttcacttttcttttgacagaaaggtgaagttcttcaagctgggcgtcgctcacttcgccgggcgcttccgtaagaaggcagcttgcgcttgccgttttcgggaaagcgatcgtatctcttaagttagtgcggcctgcaagaagcataaccaaccggtctaagccgagcgcgattccgccatgcggaggagcgccgtattcaaaggcttcaagaaggtatccgaactcctcctccgcttcttcttttgtaaagccgagaagcccgaacattttttcctgaacgtctttttcaaaaatacggattgagcctccgccgagttcatagccgtttaagacgaggtcgtaagcctgcgctttcatatcttcaggcgccgtttcaatcaggtcaagatcttcacggacaggcattgtaaacggatggtgagccgcatagaaacggccttcttcctcgtcatgctccaataacggccagtccacaacccacaggaagttgaagaggctttcgtcaatcaggccgcgttctttgccgagctttaagcgaagcgcgccgagggattgagccacaacctcaaacttatcagcgccgaacaggagcagatcgccttcagaagcatcaagcgcttcagccagttttgcctgcttctcttcatcaaagaatttcgcaatcgggccttttacgccgtcagcttctactttcacccaagcgagacctttcgcgccgtaatttccggcaaaaacgccgagcgcatcgatatcttttctggaatagtcgccggcagcgcctttgacattgatcgcttttacaacgccgccgtttgccacggctgatgagaacaccttaaattcagtatctctcactatgtctgacacgtccgtcagcagcatgccgaagcgggtatcgggtttgtcggaaccgtagctgttcatcgcttcttcatatgtcattcgcggaagcggaagcgatacttcaacgccttttgtttcgagcatgactttcgccatcatctcttccgccagagccatgatgtcctcttgactcataaaggacatttcaatatcaatctgcgtaaattccggctggcggtcggcacgcaagtcttcatcgcggaagcagcgggccacttgataataccgttcaaagcccgacaccatcagaagctgtttaaaaatctgcggcgattgcggaagggcgtaaaattccccttcatgcacccggctcggcactaagtaatcacgggcgccttcgggagaactttttgttaaaatcggtgtttcaatatcaagaaatccgttttcatccaagaaatggcggatggattttgtgacttgatgccgcatttgcaatgtttgaaacatcgccgggcggcgcaaatccaaatagcggtgttttaaccggacgtcttcagaaacgtcagccgcctggtcactgatcggaaacggaggcgttttcgccgtactgagcaccgtcaccgcttcagctttgatttcaattttaccggttttcaggttgggattcaccgtgccttcttcacgggcagaaaccgtgccttcgatatcaagcacatattcgtttctgattgcttccgctgcggcaagggcttccttcgatacgtcagggttgaacacgacttgcacaatacccgagcggtcacgcaaatcaatgaaaatcaagccgccgagatcgcgccgcttctgcacccaccctttcagtttgacggtttcgccaatcgctttttcagttatctcgccacaataatatgttcttccaaacatagcgttcctctccttcactgcttttgatctgcctttaacacttgtatcagctcgtctaacaccacttcacgctgctctcctgtttccgcatcttttacattgattttattttgggcaagctcatcttcccctaaaatcgcaataaaacgtgcgccgagacggtcagccgttttgaattggcccttcatctttttattttcataatcgatttcacttgagatgcccgcttctctcagtttgtacacgagggaaacggaataatccttcgctttttctccgagcgtcacgatgtagcagtcgatcccctgattgacgggaaggtctgttttctcagcgtcaatggctgccagcagtcgttcgatgctcatcgcaaatccgatacccggcgcttcaggtccgccgatctgttcaacaagcccgtcatagcggcccccgccggcaagggttgtaatcgctccgaatccttcggcattgctcataatttcaaaagcggtatggttataataatcaagccctctgacaaggttcggatctatttcgaacgggatgccgagaccgtttaagtattgttttactttctcaaaataagcggctgattcttcatttaagtaatcaagaatggacggagccgttttcatcagttcatgctctctgtctttcttgcagtcaagaattctgagcgggtttgtgtgcagacgcgactggcagtctgagcaaaattctccgatgcgcggttcaaaatgtttgacgagcgcttcccggtaggatttgcggctctcctggtcaccaaggctgttcagcacaagcttgacatgtttcaaaccggctttacggtaaatactcatcgcaagcgcaatgacttctgcatccacggccggatctttggagccgatcgcttcaattccgaattgataaaattggcggaaacgccctgtctgcggacgttcgtaacggaacatcggtccgacataataaagcttcgtcggctgcaccgggttcgcaaataatttattttcattgaacgcgcggactgcggcggctgttccttccggccgaagcgtcaagcttctccctttgcggtcttcaaacgtgtacatttctttctgcacgatatctgtagactcaccgacgcctcttgcgaataattccgtatgttcgaagatcggcgtgcggatttctttatattgataagtgcggcacgtctccctcataatttgttcgacgaactgccatctgtctgattcacccggcagtatgtcctgtgtgcctcttggaatgtgatatgccatgttacaggcctccttaatgtctttcttcaaataaaaaaactcccgctcctactatacatgtatagtagggacgagagttatacccgtggtgccaccctagttggaatgccgaagcatccccgctctgacctttaacgcaggttcacgtccgctgcctaatgacttgcaaaagcgttcagcagggaacctccggagtgttgtttcgagaaagatgcagtgcggatccgctttcagcccgggacggttcctctcttttccatgcattctgacctactcttctccattatcggttcaaaatcgttatcatgagttatgtacatcaatttctattataataatgggattgcactcccctgtcaagttttattccgtctgtttttccttgcgaccgcttctttcgataagagaccgaactccgtcgccgtctcttcaagaaaacccgccttttctctatcgctctgatcactgaagtgcagatttccttccgcatcgtgcagcgcgcgtcccatttttggttgatatttcatgatttgcacaccttttcgctgtatttatgactagtataaacaaaccattttatttttatttaacattcagcaaggaaaatacgatattatacaagaatgtattttagttagttcagaaaggaggacagccatgaagaagagaactcttgctcttattttatgcggcgtcatcatcacagcgcttcttccgtcatttcacaccgcaatcgccgcagagggagaagcggtcatcgcgacagacaagatcaatgtcagaggcggtcccggcctgagctacggaataaaggctgaagtaaaaaaaggggaaagatacccgatcgttaaagaagagggagactgggtacagcttcagctgagccccggtaaaaccggatgggtcgtttcctggctgatatcaaaaacagccgggggagcagacaattcatccgcaaaaagcggaacggtcacttccaccgatcctgacctccgcatcagaaaaggcccggggacatcgtatgaagtcatcggcaaacttccgcaaggcgcgcatgcatccgtgctggacaagaacagcggatgggtgaacatttcttatcaaggcacaaccgggtgggtttcttccgaatacgtcaccgcggacagcggcggatcggatacgaaagcaacttcggcccgaagcgggtcaaaaagcgggacggtcggcgtttcttcattgaatgtcagaagtgcagcgtcacatgattcagcgattatgactaaattatcacgcggaacaaaggtttccatcttaagtgaagaccacggctggctgaaaattgaagcaaacgggcaaaaaggctgggcagcaagccactacatcataaaggattctgactcatcgggcagcgcatccggctcgggagacggttctgcgggctcaggctcctcgaaaaaagcgtatattgtttacggcggcaccaacttaaggagctcggcctcgacttccgcttctatcgtaaaaagggcagataaaggcgcagcctacccgattgtcggctcaagcggcaaatggtatgaagtccggcttgaaaacggacaaaccgcatatgtggcagactgggtcgtacaaacgtcaaaaagcggtgaggaaacaggcgaagcaccttctcccaacacgtcaggcggcagcggctcacttaaaaacaaaacgatcgtcgttgatcccggacacggaggaaaagacagcggaacgatcggctactccggaaagtttgaaaaaaacgtaacgattaaaacagctaagctgttagccggaaaattgagagcggccggtgcaaacgtgtatatcaccagacaggatgatacatttatcagcctgcaggccagggtttcaacctctcattaccggaatgcggatgcctttatcagcattcactatgacagttatgccgatacgtcaacgcggggaagcacggcttattattacagtccgtctaaggaccgccagcttgcctcagacgtccattctgaagtagtgaagcgttcccctattcctgatcgcggcgttctgtttggcgattattacgtcctgagggaaaataaacggcctgccatgctgtatgagctcggctatctcagtcaaccgcaagaagaaacaatcatacatagcggctcttatcaggaaaaagtgacagacggaattgaaagcggattggaacattattttcaatcataaaaaaaaagctgccgaacggcagcttttttattgtttagaatccataatcaatgtaatcggcccggaattcgtcagctgaacatccatcatggctccgaatattccggtttccactttgactcctttttcccgaaggagttcgttccacttttcataaaggagcacagcctgatccggtttagccgcattcataaaattcgggcgtctccctttctttgtttcgccgtaaagcgtaaactgggaaacggataaaatctccccgcccgtatccaaaagcgataaattcatcttgccgctttcatcatcaaatatccgaagattcacgattttatccgccaagtaagcggcatcttcttctgtatcttcatgagtgatgccgacaagcgccataataccgggtccgatccggccggcgacagcgccgtcaaccgtcacactcgcttctgttacacgctgaacaactaatttcatagcaagctccttttagttcattacccgccggactgaatagatgtctctgatctgcttaatccgctcgaccactttgtgcagatggttaatgttttgaataaaaatcgccatatgaatcgtagcgactttattgcggtcggatttgccggagacagaggagatgttggttttcgtttcatttacggcttggagcacctcatttaaaagcccgagacggtcataccccaaaatctcaatctcaacgttatattctttgcgtctttgaacctgtgattcatgctcccattcaacgggaatcagacgttcctgcgcttcattcgttttgacgttcggacagtcgtcccggtgaacggatacaccgcgcccttttgtaataaaaccgacgatatggtcgcccggcaccgggttgcagcatttcgacaagcggacgagaaggttgtcaatgccttttacgcgcacacccgcttcccgttttctcccttgaggataatgtttcggctcggaagtgacttcctgaacgattttttcctgctcttcctggtcacgcagcttccgttctttttcggtgagcctgttggccacctgaagagcggtaatgccgttatatccgaccgccgcgtacatatcctcttcatttgagaaattgaacttgtcggcaactttttgaagattttcgagcgttaaaacatctttcacttcaaaatcaagatttttaatttctttctcgacaagctcacggcctttttcgacattttcttcacggcgctgtttcttaaagaattggcgtattttgtgtttcgcctgggacgtctgcgccagtttgacccagtcttggctcggaccgtaagaatgcttggacgtcagaatctcgacgatgtcgcccgtccggagcttatggtcaagcgtcaccatttttccgttcactttcgccccgattgttttgttgccgatctctgagtggatcctgtaggaaaaatcaatcggcacagagcctgacggcagttcaatgacatcgccttttggcgtaaatacgtataccatgtcagaaaacagatcgattttcagcgattccataaattcttccgcatccgtagactcgttttggaattccagaatttcacggaaccaggacagttttttctcaaatgtcgcttcttcgtttgcagccttgccttctttataagcccagtgtgcggccaccccgtattcagcgatctcatgcatctcaaacgttctgatctgcacttccagcggatcgcctttaggcccgattacggtcgtatgcagagactgatacatattcggcttaggcatcgcaatataatctttgaatctgccaggcatcggcttccagcacgtatgaataatgccgagtacggcgtagcagtctttaatgcttccgacaagaatacggacggcgagcagatcatatatttcattgaactgtttattttgcagcgccatcttgcggtaaatgctgtagatgtgcttcggacgtcctgaaaagtccgctttaatattcacttcttcaacgcgttttttcacttcattgacaacctcttcgacataaagttcgcgttccgcgcgctttttcttcatgaggttgacgattctgtaatattgctgaggattcaaataacggagagcggtgtcttccagctcccatttgatcttagaaatcccgagccgatgggccagcggagcgaaaatctccaacgtctcatttgaaattctccgctgcttttcctgcggaagatgctttaacgtccgcatattgtgaaggcgatccgccagcttgatcaatatgactctgatatcctgagccatagcgacaaacatttttcgatggttttccgcctgctgctcctcttgagatttatacttaattttaccgagcttcgtcacgccgtcgacaagcatcgccacttcttcagaaaatacttccttcaggtcgtcgagggtgacatccgtgtcctccaccacatcatgcagaaatccgcccgcaattgtggaagggtccatttccaaatcgacgaggatccccgccacctgaatcggatgaatgatgtacggctcacctgatttgcggtactgttcgcgatgcgcgttttgcgcatacaggtaagctttctcaacaaacgcaatctgctcctccggcagataagtgcgcgctttatctattacttgctcggcagtcaatacttgttcgttcgccatggaatcaccttttttaaatgtaaactgtattagtttattatcaagaaaaaaacgagagatgtaaagggcagaagttcaaaacacctaaagaatctgtcaggatgatgaaataataggaaaaaagcaccctgacacgagtgcttttttccatatgcggttaatatttcattaatgttaaaatatcataatcgtcaagcttgtctctgccgtcaaggtaagaaagctcgattaagaacgcaataccggctacgacgccgcccagttcttcgactagcttaatcgttgcttcgatcgtgccgcctgttgcaagcaagtcatcagtaatcagcacacgctgtcccggcaggatcgcatctttatgaatcgtcagtacgtcttttccgtactccaaaccgtaatcgactttaatgacctcacgcggaagttttccttctttccgaaccggcgcaaagccgactccgagtgcgtatgcaaccggacagccgataataaagccgcgcgcttcaggcccgacaactaaatcaatttctttttcttttgcatattcaacaatttggtcagtggcgtaacggtatacgtcgcctttgtccatcaatgtcgtaatatctttaaattgtacgccttctttcgggtaatcgggcacaattgttacgtattttttaagatccatctgttctatgtcctcctcgtactttcataagcctctgaaccttggttcatcagcttattcagccattccttcagctcatgggctgcggaataattgagcttctggtctaattccatcagctgctgttttacctgataggtttgcgaatctgccaggtcgcgttttttcgcaccgctcacgacagacagcacaccatcttctattttaacaaaaccgagatcaaaaaacacctttgtcatgaaattgattgtgtcaattgaccatcctctgtgtctcgcaagctctgaaccatgcttgccgaagtcaaaagcgccccttttcaagagaaatgcgtaaaaccacttgaaatcattccgcgatggaaatgaggacaggaaatgttcttcatgattgataaaaacaaaataaatccgttccggcttctttccgtcaagcaaatgctgcaggcgatccgctgacggcggcacatccagaaaaacggcatattttccgtcaagctggagagcttccgcctcggattccgaagtgatctcggcaagctcgcccgtcagctctttttcacggagcttctgagcggttttttcgttaaagctgatgagcacccgtttttccttcggcagtgcggtgaccgtatcttcccacgtccgcttgcctcgaatatcaaaaagctgccattccggcaccgcagcatctttaatcatcagctggggcttctttctgttgttccattcattaatggacatctcgccgacaatggaaatcgttgatccgggaacaactccggcttccagctctcctttgttaaagccgacgcagtcaaggacggcggaatcacttttcaccgtcattttcacgtggtttttattcgctccgatcaggcgcacatcatcaagcacggcatttttcaccatcacatgcggtttagggttaagcatgccgaacggcgacagcatattcaattctgtaatgctttcaacggttatgtcttcaacgccgcagacaagatcaacctcctgaacgggaataaaatcctcttccgtaagggtttcttcagccatttgattcagcctgtcccttaattccgccacatcttcagccttcagcgtcattccggccgccatcggatgcccgccgaaatgaggaagaatgtctctgcactgtgaaaggctcgtaaaaaggttgaagcctctgatgcttcgcgccgaccctttggcgattccctgctcctcatctatcccaagcacaacagcgggccggtaaaaacgttcagccagcttcgatgcgacaataccgacgacacccggattccagccggcttttgccactacaatggcagacgggtttccgccttgctgctgtaccatttcaacagcctcttcggtcatggttttcaccattttctgccgctctttattcagccggtcaatatccgaagccagttcctccgcttcaaactgatcttcggtcatcagcaggtgcacagcgggatcggcctgttctattcttccgacggcattaagcctcggtgcgacctgaaatccgatcgtttcctcatcagcttgtccgatatctccgccggaaagcttaatcagagctttgaggcccggccgatttgtcgtacgaagcctttcaattccgagtgacgcaattaatctgttttcatcatgaagaggcaccagatctgcaaccgtaccgattgccgccaagtccagcatagcttccggcaaagaacccgtaagcgcgtgggcaagcttaaacgccacaccgacgccggccaattctttaaacggatagccgcatcccggctgcttcgggtggatgatcgcaaatacgtcaggaagctcgggtcccggctcatggtggtcggtaataatgacgtctaagcccagctcttttgcgacttcagcttcatggacggcggcgattcccgtatccactgtaatgatcagcgaaaatccccgctcttttatggaacggaaagcttgttcattcgggccgtagccttctgtaaaacggtcgggaatataaaagtcaacgtccgccgacagctgtctgagtgccgtcagcatcactgacgtgcttgtaacgccgtctgcatcgtaatctccgtaaatcataatcggttccccttgagaaaccgccagttttatccgatcaactgcttcccgcattccctttaattcatacgggtcataaaagtctgcatcctttgtatgtaaaaacagccttgcgctttcggcagtatcaaaacctctttttacaagcagtgatgccacaagaggtgttatgtccaattgttctgtgagtgatttgactttttcctgatccggctgctggatttcccagcgcatttttgacgctaacataaattcacccctcaaccaccctattatactagagcggactgaggggtttcaaatgttattctgatccttttttctcttcaagcatttcttccggcggcgcggctgtttttttgccgtccgaatcagccgtcaattcacctgcggatctgttttctttccgcagcattttaatttcgcgcttcagtttcatcacttgaaatataccggctgaaaacacgatcagcgctcccattaacacagagcctaaaatgactaaaatcagcggccattcagcggttccgaacagataatcaacctcaaccgcccgcacgttaatgacagcaaagatggcgacaatcagagtaaatagtaaagcgaatataatagtccattgtttattcatgcgtctgcccccaattattgattcttatcttttcccccattttcccgggagtaaaccccggtctcaggaaatccgggccgttaattgctcgcggaccagctttttcagtccgcttctttctcccgatataacgagggtgtccccttcttcaattacggtatcaatgccggggctcagctgtttttgccggtttttcttcacgatcgcaataatctggacgttgtaatgtttcttgatctccaaatctccgattgtgcggctgacagccggtgcatgagattcggctttaaaccactcaatgacgaggtcatcaagcgcgacttccacagattccagcgctttcggcttatacgtcatcccgcctaaaatagcggaaatctgcctcgcctcttcgtcgttaaattcaacggatgccaagcattcgtcataatcattctcatcgaagtaatagagctcttttctgccgtcatcatgaagaataatactgattttatcgtgatttttcgtaatgacttctactttctggccgatgcccggaagctccgactcacgaacgttcataagaaccccctacatgttttaacaatgatgattgattatgtaagcgtatgtcattatagcaaatgcaggttttaagttcaatgcggcctaaaaaaaacaggctgccttccggaagacagcctgtttccttttactcttcgattgattttttccctttaaattcttttcctttccatacaagccacagctgcgcggcgatgtaaagagaggaataaacgcccgtcaataaaccgaccaataaagcgacggagaagtttgtaattgacgatgagcccaaaatgagcagcacgacgaccacaatcacaacggtcaagaccgtattgatcgaacgtgtaaaggtttgctgcaaactcagattcacgatatgttccagatcggcaaatgacttcggcttgcgttttttcatctgctcgcgtatccggtcaaatgtaacgatcgtatcatttatcgagtaaccgattatggtgagaatagcggcgataaaggttacgtcaacctccagccttgtaatgctgaaaaacgcgacgataaagaaagcgtcatacagcagggatacaatcgcggcgattgccattctgtactcgaaacggattgacacgtaaataatgatgccgattgatgcaattgccacggcatataaagcattacgggccagttcttttccgactgtcggcgataccgtgctgacgttcggttcagatccgtatttgtccttaaagtacgttttgatttcagcgattttttctttggatggctctccgacaaaccgggccgcggcaacatggttctctttacccgagagtacgatgttttccggatccatgccgagagagtcaaagtctttttcaacctgctgcgccgtcaatgcatgattgctctgcacgtcaatccgcgcaccgcttgcaaaatcgattcccaggttgagtttaaagaccagtaagatgataattcccgcaatggttacagcgcttgagaaaataaagaaatattttcgtttgctcgtgaaatcccatttctggaatgccgtatgcggttcagtattttcatctgttttttgaatgtccataatatgttttttcttgacgccgaaccagctttttttccggtcaagccatctgctttccacaagaagggcgagcaggaatcttgaaaggaagacagctgtaataaagcttgtcagtattgacaaaatcagcatcgtcgcaaacccttttacagagcttgtcccgaaaataaagagcacgaccgctgcgatgatcgttgtgatgttcgcatcaaagatcgtcgcaaatgaccgtctgttccctgaacggaaagctgagcggacggatttgccgagtttcagttcttcttttatccgttcataggtgatgatgttggcgtcaaccgccatcccgacacccaaaatgagcgccgcaatacccggaagcgtcagcaccgcctgcatccagtcaaacacttgaagcgtaatatacacgtatacagaaagcgtaatgaccgctatgagtccaggcagtctgtaataaagcagcataaataagaaaacaattgcaataccgatgatgccggcctctaccgtatcatgcaaagcctgctgtccgaattgcgcccctactgaagtagagtatttttcggtcagtttcacaggcagcgcacccgcgtttaaaatattggccaagtccttcgctttttgaacggtgaactgaccttcaatcgtgacatccttcgtgtttaattcctggctcacattcggagcggatacatatttcggatgttttttgccgacttcttttttaaatgaatcgcccttttggtaatcaagccagatcacaagctgattattaggggccattttcttgacttttttcgtcacttctccgaacttatccgcatccttcagcttaacgctgacaatcggttcgttcgtcgtcggatcaaaggtttgcttcgcgccgttttccacgagatcagagccgtttaacagctctttatcattcgtatccctgaacgagagctgcgcttccgttgacagaatttcgcgcgccctgttctgattcgtgacgcccgccagctgaacgcgtatgcggttatttccttcaatctgaatgttcggctcgcttacgccgagaacgttagcccggcggttcagcgcctgcaccgtgctgacgagcacgtcttttgtgattttatcgccttttttgacgggctgcacatcgtacagaacttcaaacccgccgcgtaaatccaatcctaacgtaatattattggcagccggttttgtaaaataccccagccctgtgccgatcaataatacgatcaggaaaaacgcaatcaagcgtccttttttcattatgtatttcctccttaaacctatgccgtcaaatcattatctcagcagttcatccaaagcttcctgaccctcatcgctttccagccaattagacgacttaaaagcttcaacggttgcatagttcataaaatcgccaattttaactgataaaatattaccggccaattcatgcagcggcaattcctttttctgtttccactttttatgtattaagtatgaccataaactctcgtgctcaacatcatcgtatccaaggattttgaactcttcaagtttactgtacaagaaaggccgcaaatgatctttgtacatttcggcgggatgtttctccactgggcgctcgctcctttttccatttttctcgaagacttgtcatgctcggacgacatcggcgcatatctttattgtatatgattccaggtagtttgagaaggcaggggtttataaaatggcaaaacagacttttttaaggggcactcttattctcattgcagccgggatgattacgagaatgctcggctttgtcaaccgggtggttatcgcccggtttatcggtgaagaaggggtcggtttatacatgatggctgccccgacatttttcttggccaccactttgactcaattcggcctccccgttgccatcagcaaacttgtcgctgaagcaagcgcgcggggggaccggcagaaaatgaaacacattttagtgatggcgcttaccgtcaccgggatattaagtctcatcttcacgccgctgtttttatgctttgcgccgattatgtcagaaacgatgctgacggatcagcgcacggttttcccgcttctggcgattacgcccgtcgtgccgattatcgcgatatccagcgtgctgcgcggttactttcagggcaggcagaatatgaacccgctggcgttttcccaagtgcttgagcagatcgtgcggatttcacttgtcgcagtctgcacgacggtgtttctgccgtacgggattgaatatgccgcagcaggagccatgatttcgtctgtcatcggggagcttgcctctcttatttatttattcatttgttttaaagcaaataaaacaatcagaatcagaaaacaatttttcaagtcgattgcaaatggaaaagaaaccttccgccagctgatgagcgtgtcgctcccgacaaccggaagccgcttcatcggaaatttatcttggttttttgaacctattgtcgtcgcgcagagccttgcgattgcaggagtggccaccgctgccgccaccagccagtacggggagctgaccggatttgccatgacggttttgacgctgcccagctttataacctattctctgtcaacggcgcttgttcctgcgatcagtgaaggaatggagcaaaaaaagctgcaagttgtagaataccgtctggaacaggcgatgaggctgtgtcttttaagcggaggcatttcggtggttattttattctctttcgctgatgaactgatgtccgtcatgtacggatcaactaatgcggcggtatttgttaaagtgatggcgccgttttttctgctttactattttcaggggcctcttcaggcggtgctgcaggctctcaatttagccggggccgccatgatgaacagttttatcggcgccgctgtcaaaaccggcctaatttttgttttggcgaccaggccttccttaggcatcatgggcgccgcacttgcgattgtaacggggatggtccttgtcaccctgctgcatgcggccaccgtaagcaaggtgcttccgatcagcattaaaataaaagaatacgcgctctgttttgccgtcatattcatttgcggttatgtcagccgcatcatcaagcacaccgttcatttttcaggatcagaggctgttaatctcacaggctggattgcaatgaccgcgattttgtacattgcgctgctgctgttattcaggctgattaaaagggaagagctgatccggattccggtcatcggcaagttcgtgacgcggtgaagccgatttatggctcccctttttcatctttgagatcaataaaaaaagcgccgtccgtaaacgtgcagaatgatataaccgaaagatcgcgatatcctctttttgctaaatttttttcaagccagtgtttatctttcccgattctgtccagatgctcgttctgaatgaccccgtcaacgataagcgatgtttccatctgcttatccttattgtttttctttttgacgattgacagtttgcccgaagactccaaaatggcatacgatacgtcagagattctatcgatgttattctccctcagctgcataagaagatcgtcaaaattgtagcgctgcgatctcatcgcccgttcatcaatttttccctgttttataataatggtgggttttccgtcaagcagctgccgtattttttggcttttgagcgaaataaaagcaaggcttacttgaataatcattaaaacgacaatcggcacaattgtatgcaaaagcttatcttttacattttcaattgccaatacggcaatctcggcaatcataatggagacgacaaggtctaaaatgctcagttctccgatttcccgttttcccatcagtctgaaaatcacaagaatgataaaataaagcacaatcgtacgaaacgtaataatgaaaatatcttccatatcgcacctccaacggtcatagcatttgccatcggctctgaattatgtaagaaacgggctgaacatcatgcatttacgtctaattcgaacattcagagaatacatttagaaaaagacgggctccggcttgtcatatatcaggccgcagagcggagaggagataaaaatggaagaaacgaaacaagtgggaagaggcgttttgtacggcttagtggctatttttgcggtgatgcttcttacgagtttggcgatttcgcttttactgacagtcacctcaatggaagaatcatctttcagctggctgatcaccgcgctttcttttctttctttatttgcgggaggttttatatcgggcggcaaagcgaaggaaaaaggctggatgatcggagcgttaaccgccgtctgtttttcattaatcatcttgctttttcaatatttagggttcggaaaaacgtttacatccggtcagcttttgtttcatctcggctttttgggagtcagtatgctgggcggcattttcggagtgaatttgaaaggaagcagatcagcgtaataaaaaaagagcggattctccgctctttttttgtatgtatgagcttcgctgttattcagcggaagcttctctgattgcgcggcggtcaaatgttaaacgggtgttatcacctgttttaatgacgaccttgctttcatcaattgaatcaacagtgccgtgcaatcctccgattgtcaccactgaatccccttttttcagctcttcctgcatctggcggacggccttctgctgcttttgctgcggacggatgagcaggaaataaagcactgcaaacattaaaataataggaacgattgtgcctaaagtacccatctgtttccctcctttcatgaatggttttatttagaagcttttcgcatttggcttattatagccgtaacgctcaaagaactcttctcggaaatcaccaagacgatcctcccggatggcttgtctgacctgctccattaagtgtaacagaaaatgaaggttatggtaagttgttaatcgaattccaaacgtttcattacagcggatcaaatgtctgatgtaagcgcgggagtaattttggcatgtatggcagctgcactcttcgtcaatcggacggaaatcacgctcatatttggcgtttttcatattcagacgcccttcattcgtaaacaccgtgccgtttcgggcaatccgggtcggcagtacgcagtcaaacatatccacgccgcggatggcgccgtcaattaaggcatccggtgaacccacacccattaaatatctcggcttgtccttcggtaaaagcggggttgtaaactcaagcactcggttcatgacgtgcttcggctcgccgacagataatccgcctatggcataccccggaaaatcaagcgaaaccaagtcttttgcactttgtgtccgcaggtcttcgtattctccgccctgtacgattccgaacagcccctgctcatctgagcgcccgtgcgcctccaggcagcgttccgcccagcggctggtccgttccacagagcgtttcatgtaatcatactctgccggatacggcggacactcatcaaacgccatcatgatatcagagccgagggcgttttgaatttccatcgctttttccggagataaaaacagcttgtctccgtttaagtgattgcggaaatgaacgccttcttcttctatattacgaaacttgctcaatgaaaagacctgaaaaccgccggaatctgttaaaatcgcgcggtcccagttcataaacttatgaagcccgcccgcttcttttacaatgtcgtgtcccgggcggagccataaatggtacgtattgcttaaaataatgcccgcatccatagatttcagctcatccggagacatcgtctttaccgtagcaagcgtgccgaccggcataaatacaggcgtctcaaaggagccgtggggcgtatgaactctgcccagccgcgctcccgtttgtttgcattcctttataaattcataacgtatcggttgttcagccactttgtatgaggcctcctgtcttcaaattagataatcagcatggcgtcgccaaagctgaagaaacggtattcctcttctaccgcatgacggtaggcggaaagaacatgctctctgccggcaagcgcagaaacgagcatgataagggaagatttcggcagatgaaaattggtgatcatgccgtcaatcgctataaattcatatcccggataaatgaatatggacgtccagccgcttgaagcggtaaatacgccgtcatgctcgccggcaatggtttccagggtgcgcgttgatgtcgtcccgaccgacacgatgcgccctcccgcctttctgacctcgtttaaagaggcggcggtttcttccgtcatttcataaaattccgcgtgcatgttatgctcttccacatcatccgcactgaccgggcggaatgtgccgagtcccacatgaagtgtgataaattcaatccgcacacccttttgcttcagctcgtccagaatctcttccgtaaaatgaagtccggccgtcggagctgcggcagatccgatttcttttgaaaagacggtctgataccgttctttatcatcaagctgctctttaatataaggaggcagcggcatttcaccgagtgattcaagcacttcgtaaaaaatcccgtcataccggaattctatttttctgcctccgtgatcaagctcctccgtgcagaccgctgtcagccggccgtcgccaaatgtcaggaccgttcctttttttacgcgtttcgccggctttacgagcgtttcccatgtatcattttcttcctgttttaataacagaagctccactttcgctcccgtatcttcttttgtgccgaataatcttgcaggcagcacacgggtattgttcaagacgagacaatccccttcattaaaaaagcttacaatctctttaaatgaactgtccgtcagcccgcccgtctgtttgtcgagcaccatcagccgcgatgcgtcacgttctttcagcggcacttgggcaatgaggcgttcaggcagttcaaaatcaaataaatcgactttcatcatttcacctttattctgtctattgttatttcattctgccgaaaaaattaagcagaatggatagtatcacactgatcacaatacaagtgacaacgggaaagaaaaatgtaacatttcccttcttaacgaaaatatctccgggcagccttccgacaaagtgccagactgcgccggcaataagcaaaacggcaccgagaaccatgagaaccttcggaaagtcagtcacgggcgggcgcctccaatcgaaaatgttcatacacagccggagtcacgacccgtcccctcggcgtcctctggagaaatccgatctgcagcagatacggttcgtacacatcctctattgtatgcggttcttcgccgattgtcgcggaaatcgtatcaaggccgacgggacctccgctgaatttttcgatcatgcccatcagcagcttatggtcgatatggtcaaggccgagcgcatcgacttgaagacgttcgagcgcgtcgtgagcgatttcttccgtgatgcggctgtcgccgagcacctgggcaaaatctctcacccttctgagaagccggtttgcaacccgcggcgttccccttgaccgtctggcgatctccagagccggagcttcttcgatatccacttcaaaaacgtcagccgttcttgacacgatatctgtcagctcttcctgcgtatagtattcaagacgcgacagcaccccgaaccggtctctgagcggtgcggtcaataatccgacccttgtcgtcgctcctacaagcgtaaaagggggaaggtcgagacggacggagcgggcggacgggccttttccaatgacgatatcaaggcagaaatcctccatcgccgggtacagcacttcctcaatcgagcggttcagcctgtgaatttcgtctataaacagcacatcccctggttcgagcgccgtcaagatggctgccaaatctcccggtctttcgatggcgggacctgacgtcgtccgcatctccacccccatctcattggccacgatagacgcaagcgttgttttcccgagacccggaggcccgtataaaagaacgtggtccagcgtttcctgcctcattttcgccgcatcgataaacacgcgcagattttctttcaccttcttttggccgatatactgggcgagattctgcggcctgaggctttgctcgattattgattcatggctgtctgcttcacttgaaacgagccgttcatccatgaacatcaccttactttaataatttttgcaatgcttttttcacatattgatctgttgaaagcgccgtttcctcttttaagtgaggaagcacttttttaatttctttttcggcgtagccgagaaccctaagcgcttcaagcgcctcgtcaagcgccgtttcagcctcttgtttttcaatgcgcgcttcatgattgaacaggttgtcaatcatttcaggcacgacgtcggccagtttgcctttcaaatcaagaataatctgccgcgccgtttttttgcccacacccggaaatttcaccaaaaaggcttcatcttcctgttcgatcgcttcgatgacggctccggggtcaccggaaccgaggatggcgagcgcccctttcggcccgatgccggtgacgttcagcagctttgtgaaaagcgctttttcttcccgggttgaaaaaccgtacaaagaaaaggcgtcttcttttatatgatgatacgtaaaaatggtctcttgattgcttaccttataaataaacgggttcggagtgaagacctgatagccgattccgccgttttcaatcacgatgtattggggagatacataatcaatcgtccccttcacgaattcaatcacacctattcacctctttgactgcttatcattgtaacacaaaaacagccaaagtcttatagaaaagttaacgtatgttcgctttgacatcttccattcagaaaaaaaagacatgtgtcacatgtcttgcgtcaaagtcatccgctgtaagtcttaatatgatcgatcacgctctcaaactccgcttttgtcctgtacggtatgccgtgttccaagtgcttttgcaatcggctttccagcctttctatatcaatctggaagaaagattggatcggctcggccagcgatccgggacggccgtgaaaagtggagatgacgcctccgtccgtgacgccgatataaccgttaaccttactgagcggagaaatgtcatcaacatgcttacggaaaagaacgaagccttttttctgctcaacgagcgtccagcccgcatatgcggcccaaaaatcctccatcgccaaaacggtttcatccgtatgttcgatgccgacatcaccgtccagatagaccttttccagctggacgtgcacccgaagcggcccgtaatgctcaacctccgccccgtatgcgccttttcctccgcaaatcaggactgcagccgataagataagcataaacaatagacgagcaccgcaaattcgtttcaccaataacacctctttattcaatcaaactcttgatgctagtttgaccaaagatgccggtgcttaaccgttttctttcatttgtctgtttcagccgaataaaagcagcctctattatgaaggctgccccgatgattatgcccggccggctgaaatcagtttcatttgtccggacgtcagtttgagccggtatccccttacggtcagatacacagttttttctccgcggcttttgtcatgctccgtttttttcattccggcccctccgttacgttttattacttttatgttaacaccgcaacataaagagcgttttaagaatatgtaaagaaatgatgaagctttatccataaaaatactgccggatgaaatcatccggcagtcccgtttaacggctgtttctgttcatgtcttgcagctttgtaaaagtagcgttgtcggtaaacacttgaattgtacggccgtccgcaaatcttttggccgcatgtttgacatgtttatcatcatttttcgtaaaaggatgatttgttctgacagcaatgacgactctcgtgtcagtcacgatgacctgactatcctgtacgccttttacttttttcacgcggtttgcaacttttgccgccagcctgatgttttcggcgttgtcatacccattataagacatagctgccggcggcgtattgacatttcggccgttatatgtgccgtccgtcgttaacggaaccccgtcattaggcgcatactggtcagacacgtttgtcgtattatgacggccgtttcggttttccatcatttcagaaacgggtccttgatggtccattccgtactggcgtctgccgttatcattatcattcgaataatatccgaccggacgtgttgactgattgtagcgtccgtcattcatggcattatttgctccgcatgccgttaagcttgccgtcacggctaaaacgcctgcgatcgtcatcagttttttacccaatggaaaaaccccccgtggattcatcgctgtttgagcgttttccgctcatgtttaggatgtgcggccgacggcgggtttaagcttgtcagttatgtccattcctcagttggacataaaaaaaggaacgacatacatcgtcccgaaacattaatcttcttcttcctccggccgtccgaatacttgatttggactcggctgattcggtgcggcattaggatttgctccgccgtaaggcataaaatatccggcgtttgcacccacattcggatacggctgcacaggcatatttgcgtgatggtgatgtgaaccgtggtgatgatggtggtggtgatgtgaatcatggcagccgcaatcatcatccttaaatttcccatcatgatgaggcgcgtttgcgtaatgagacgaatatccgccgtaatacggcatttgaccgtacggagcaccgccgaaaccggatgcagaaccatcataatgctctgcattttcatgggcctggttttcatattcaccgtaacccgcttgcggcccaaatcccggatgatggaatccgtgatgatggaatccgtacggtaacggcatcggcattaccggaaagcctccataacctcctccaaaaccgccgaaacctccgcctaccgggaagcacggatggcatagtcccgaacccggcagcatcggtgtcaccggaaccggacaaggacaaggcatgcacggcatcgggtaatgcataaaaggcggttcaacggccggcatattcggaaacgggacattcggaatgtttggcatgttcggcagatgataagcggcgttttcttcttccatctttccggcttcaggcgccttcggcatattcgggtaattcgcgttttccatgttgatcatttcctcctgttgtggaatgttattgtcatgctctttttctttcggctcgacaaaatgtgtcaccggttcctccggcttaggaggcgaccacggctgaaacagctgattggacggataatattggttcatatcagcttccggcagcacattttcatgcttttcagggattggcggcacatacggaattgacggcttcggttcttccggtatggtgtcttcaatgtccacaactgatttcggtttttctttggcatatggatgctcatgcttatgcgcagacgttccgaagccggccttgggttcttttctgaccggaacggcttctgaaggcacctttatcttcattccaggcataattaagtctggattgctaagctgatgattcagtttttttaactcttcaagatcaactccgtatttttcagctattttccagagcgaatcgcctttttgaacgatatgaattttcaacgttttcccctcctatgcacaaaacgtgaacggtacatttgtcattacaatacgtttcttcacactatatgccggtggactgggcatgatgataaaaaatttgggaaggaggggaaatttttatgattacgtatgactcagcattctgttcaaagcacgaagcgcttctgtccgaaccgcttccggaactttaatgacacccttcggctcgcctttttcaagctgctcaagcgaccacaataaatgcggcaggtcgattctgttcattgtcagacacggacacatatcgggattcaatgattcaatctgtttatccgggtgcgagtgaatgaggcgctgaacaagattcatttccgtgccgatcgcccacttgcttcccggttctgcctgttcaatcgtatcaataatatatttggtagacccgctgtcgtcactgagcgagaccacttcccgcgaacattccggatgaacgataatgcggatgccggaatcccgctgccgcagctgaaaaatattttccgctgtaaacttttcgtgtacggagcaatgtcctttccaaaggatgactttaatgttttccggatggtcagtaagcaatcggttctgccccgggtcccatacagccatttctgtcagcggaatgccgaggtcataggctgtatttctgcctaaatgctgatccggcaaaaataaaattctttctttttgtttaaaagcccatttcagcacactccgggcattcgaagaggtgacggtcgctccaccgtgccgaccgacgaatgctttaatttccgccgtcgagttaacatatgttaacggaatgatggtgttaccgtacagttcttgaagctcttgccatgctttgtccgtctgctgaatatctgccatatcagccatcgagcatccggcgcgcatgtcgggcaatatgacggtttggttatcatcagtcagcatatcagcggtttccgccataaaatgcacgccgcaaaacacaatatattccgcctctttatttttttctgccacttgagcaagctgcagggagtcacctgccgtatcggcgaattgtatcacttcgtctttttgatagtgatgccccggaatgaacaggcgctttccgaaatcccgtttaatggcggcgacacgcttttccatttctccggtgctcatgtctttataatggctcggcatcatttcggctgatgcagttaacacgtcaaaaatagacatcttaaaaatccccctgttccgcagcctcaacatccatgctgatgtcggcgctttttactgaatgagtcagaaatccgagtgaaatatattggacgcccgtccctttataagcgggcaatgtgtcgagcgttatgcctccggatgcttccgttttgatatggcccggtgtcatgcctgcaaaacgccggacggactcaggcggacagttgtcaaacataataatgtctgcgcccgcttctattgcctcgagcagctgctgttcggattcgatctcgacttccaccgcaagcatctgccctgccgtttctcttgcccgctccacggccgcctttatcgatccgcaggcggcaatatgattatctttaatcatgatgccgtcatataagccgaagcgatgattaaagccgcctccgacccgaacggcgtatttttccagcattctgagccccggtgtcgtttttctcgtatcacaaagcttaatggacggatcatcaagacgccttttagcctcgtccgtcattgtcgcaatgcctgacattctttgtatgagattcagaatgacccgctccccagtaagaagagctgccgcccggccttccatttcagcgagcacatctccttttttcatccgttctccgtcttttttcagagggcggatgcggatatcatcgtgtaaaagcttccatccttcacggataacgtcttctccggcaaacacgccgtctgtttttgcgatgatccgcgctttacattgctgatcagaaaaaatcgcttgtgacgtcgcatcacccgttccgatatcttcctgaaaaaaatgagtcagcatttgtttcagctgcagaatgtccatagttccccaatcctttcgttttttctgataaccgttccagatgttgaatgaatgatttgttttccgtgccaatctttctccgtcccgggaaaatcagtacgaaaatgagcgcctctgctttcttcccgaataagggctgaggtgacaacaagttgcgcagtcttccataggcaggatagctctgcttgttccattgtgatatccttcacatttatatgatgcacagatacgttgttaagccaggatgtcagcgcctgcaggttttctttttccctgacgatacccgctccggttgtcattttggcttgaagcacatgaatcgttgtgtccggcacttgtaagatgacatcagttttcttcggggtttttttatatcttccgtttaacggtgtttgaatgatatgttcagcacatcgttgcccgcttgccagcgcttccagcagtgagttgctcgcaaggcggttcgccccgtgcaagcctgtgcaggcggtctcgcctatggcgtacaaatcaggcacggacgttttcccccatgtatcggcttttactccgcccattaaaaaatgcattccgggtgctatggggatcccgctttcaagatcaacgccggctgtttgacaaatttctgttatggtcggaaaacgtttgttaaaatcggctattcggctgcaatttataaaaacaggattttctttcatcatttcttcataaatcgcccgtgaaaccacatcccggggcgccaaatcctcaagcgcgtgtctgccagccatgatcctgcgcccgaagcgatctgctaaatatccgccttctcctctcactgcttcagaaatcagaccgtaaacagtcccgtttttcacaaggagggtcgggtggaactgggtgaactccatatccgtgatctcagctcccgcgcggaaggcaagagcgatgccgtctcccgttatggcggaatcatttgtgtgatattggtacagactgccgcagccgcctgaagcaagcactacacaatccgctcttctgtaagaaacggcacctgaagcatcctttacggcaacgcctgcgcatcgcccgtgttcaatcagcagatcaacaaccgtctcgtgttcaatgatccgaatgccgtccctcagctgccgaaccagaaactcaaccagcatccgtccggtcgcatctcccccggcgtgcagaatcctccttttggaatgagcgccttccctgccgagacaaaacgttccgtccgacttcgtatcaaaagggaaaaggccttctatcagcctgtttatcatgctctgtccgctttgcagcaaatgccgcacggctgtcacgtcattgtgtccgcatcccgcatacagtgtatcgttcacatgggattctatcgagtcatcttttgcgtatgaaacagcaatcccgccttgagcataatacgaattgctgttcgttacgtttctctttgtgatgacggttacttggtatgacggaggaaatgaggaagcacaggcaagggccgccgtccccgtaccaatgacgataattgttttttcagacatacatcaccctcccattatatttacacctgtcttgacacctatatttacacaacgataaaataaactcaagctttttttaacataaacggataggagacgggctgtatgatttatcttgattacgcggcgggaacgcctttaagcaaagaagccgcgaaagtctttcagcatctcagcacagaggtatacggcaatgctagcagccttcatgacgccggaggaagagcggcggacgtgctggaatattgcagacattctgcaggaaaattgatcggcggagcggcagacggcattcactttacaagcggcggaacggaagcgaacatcttggccgtccaatcattgctgtacggtctgcccgatcataaaaaacattttattacgaccgcaatggaacaccactcgatccataatgccgcggcgtttttagctgaccggggaattgatgtcaccatcatatatcccgacgaaaacggccttataaccgaggacatactggcggctcatatccgtcctgacacggggctcgtttccatacagcacgccaattcagaaaccggcctcatccagcctgtgaatcgtctggccgcttttcttcaccagagaaacattttactgcattgcgattgtgttcaaagtttcggcaaactgccgattgatgcggatcaggcgggaatcgacgccctttccgtctccggtcataaagtatacggcccgaaaggcaccggggctgtttacattcggccgggtgtcagctggaatccggtttatccgcataccgtgcatgaaaacgggttcaggcccggtacggtgaatgtgccggccatcggcgcttttaccgctgctgcggagtatgcagtgaaacatatggaggaacaccgtgagcatgctgacaggctgaggaattatttgtatgaccaaattaggcgtcaaggcctccccatttcattttcagaggaagaaaccggcggtgaatgcctgccccacattgtcgggtgtttttttcactcctttgaaggacaatatattatgttagaatgtaatcgtaacgatatttgcatctcaaccgggagcgcatgttccgccggcagccacggcccttcttcagctatgaaggcgctgagaaaaaccgaacgggaagcgcggcagtttttccggatctcattcggaaacgaaacaacatgtgaacagctcgatatgctgatacatacatttacggcgctatgggagcaaaagaaaggagaatcagcaatttgacagaaggaacgaagcttactggggcgaaaagacgcgacatgctgcttcattggctgaaagaagccggctcgccattaacaggaggcgaattggccaaaaaagcaaatgtttcaagacaggtgatcgtgcaggacatatcgctcttgaaagcaaaaagcgaaccgattatcgcgacgagccaaggctatttatacatcagcatgaatgccggcggcgaaaaaaacgccgaacggattgtcgcctgtctgcacggcccggagcggacggaagaagagcttgaactcattgtcgatgaaggcgtcaccataaaggacgtcattattgaacaccccgtatacggcgatttaaccgccgccataagagtcagcacacggaaagaagtcaaacaattcatggatcacattaactcgacaaatgccgcttacctttcacagctgaccggaggcgtgcatctccatacgttaagcgccccgacaaaagagcggattgaccaagcctgtcaagcgctggacgacgcgggtattttaataaaagattaaaaaaaaagccccctgaaggggagctttttttatatcgaataggattgatatgttcccagaagcttgacccggcagccgagggcttccatctcttgaacggcaccgggaatgagaacctgatccatcgcctgttcaatatcaataataaagaaatagttgccgagacccgttttggtcgggcgcgattcgatctttgataaattcaggtttctccatgaaaaagcggacagcaccctgtgcagcgcgcctgattggtcatcttggggaagcgttaccatcatcgtcgttttcggccgtgaagacagtttcgcattcacttcgaatgagacgtctttttcaggcgaaagaatgacaaatctcgtgtggttgtcctgataatcctgaatatcccgcttcacgatgctcaatccgtatgtagcggccgccatttcatttgcaatcacgccgatcggaaggtccgaatgctcactgacatacttggcagccgcacctgttgacttcgcatactcataaggaacggacgaaaaatgccggtgaagaaatttgtgacattgcgcaatcgcatgggaatgagaataaattttctcaagctttttccactcattttctctcgaagggtgaacgagcagatgctggtgaatcggcagcgtcatttcccccacgatcgcaagaggctgctcatgaatcaagtagtcaatcgttaagttaaccgagccctccagcgcgttttccaaaggaacaaatgcaagatcaacttctcccgcaaccgccgcatccatgcatgccggtattgtttgataaggtgcttgtgtcacgctgttttgaaagcaggaactgactgctagatgtgtaaatgtggcttctggccctaaataaccgactttcatgtctcttctctccttacgcgcctgaccctaagatctcaactttttctataaaatcaaattttctcagtttattcattaacgtatgaatgttttcttccattgcggacgtactgattgagagcgtgacattcgccctgccctgaagcggaatcgtctggtgaatggaaagcacgttgcttcctgagtcagccaccgcctgcaaaagctgggataacgcgcctgaccgatcctccaaatgaaagaaaagtgtgattatttgttctttaaccatcgtgtaaaaagggaaaaccgcatctcggtatttgtaaaaagcgcttctgcttaaatcaactttctgcacggcatctgcaaccgattcagccttttttctgtcgagcagctttttgacttcaagggttttccgcatcgcatcaggcagaacgtcttcacgcactaaataaaatgtctcttctttcacctgcacccctcccttttacatcagagagcctgcattgcaagctctccgtctttttaatcaataaattcaaattcaaattccagcagccggatgatatcgccgtctttagcaccgcgttctctgagcgcttcatcaacgcccataccgcgcatctgtcttgcaaaacgcttgacggattcgtcacgggagaagtcagtcattttaaagagacgttccagactgtcacctgaaagcacaaacgcgccgtccggatcacgggtaatgtcaaatggaatttcttcatcttccatcgtgtacattacacggttttccgccagttcttcttcatcatacagcgggaattcaggcgttgtttccagctggttggcgacttcaaacagaagatcgcggagtccttctctcgtcaccgcgctgatcgggaagacaggatggtcatcctgaagcttttctttaaacgcttttagattttcagccgcttcgggcatgtccattttattcgcaacgataatttgcggacgctccgtcagccgcagattatattcactgagctcctgattaatggtcacataatcctcatacggatcacggccttccatcgctgacatgtcaatgacgtgaacgatgacgcgcgtccgttcgatatggcggagaaattggtggcctaagccgactccttcgtgcgctccttcaatcaaaccgggcagatccgccatgacgaagcttcttccgtcatccgtttccaccatgcccagattcggaacaagcgtcgtaaaatgataatcggcgattttcggctttgctgatgaaacgacagacagaagcgtagattttccgacgctcgggaagccgacgagacctacgtctgcaagcactttcagttcaagcacgatatagcgctcttttccgggctctccgtgttctgacagctgcggcgccgggttggccggggtcgcaaagcgggtatttccgcgtccgccgcgtccgccttttgcgatgacggcgcgctgcccgtgctctgtcagatcggcaatgacctgttttgtatcgtcatccgttacgactgtgccgggcggaactttaacaaccatatcgtccgcatttctgccgtgctggtttttagacatgccgtgctcgccgcgtatcgctttgaaatggcgctggtaccggaagtccatgagcgtgcgcagtccttcatcaacctcaaaaacgacgtcgcctccattacctccgtcaccgccggcaggcccgcctttcggcacatatttttcacggcggaacgcaaccattccgttaccgccgtcgccgccttttacatatactttcacctgatctacaaacataatatcctccgttctaaaccgtaaaaaaccgctagttcattccaatttcggccacacattcatggccggtcagctcaaattgcatgacatcaaagtcctcataccgggatttgcgaaattcatcaaacacatctgcatttgcaatcgttccatgaaaatcgagatatacaataagctgtctgtcagggtgatccgtctgcagcgatacggtcagatgattttcactttcattgcttaccgccagaccgaacagatgaaacagttttctcatcaggttcgacagcttttgatcatatgccgataaatctttaatttctccgagcacttcgtattcgagcctcatataacgggacttccaattaaatgtcagaaagtcaaacgccaagtgcggggttttcaggtttgagagctttgactcgtgctttgcatctatgaccatttcgtcgattatttcaacgaccctgtcatacttctgcaaacttaagtttccttttatcagctgcagcttattcatccaatcatgacggaaatggcccattaattggatcagttcattgatcagagccgcatcgcttacaggttcttcttgtttcttcgatacatccttcattttcgcactcccaatcgtttaatttctttttaggagtcttgataagtgtgtactatgaattataacagagaaggctttgttaaaaaaacacttgtttttcctggttcatcatgttcctttttcggatcgcatacaatgcggatgccaggcagaaacatttttggtatcactgcttggggaacatatccagtgggtatgagaagctgatgtcctcattcaaggcggggttcactcacgcatcctctgcttttcattcttgatgttactccgcttactgcaaaaaaaactccagtcaacgaccggagttttttgtgtcattattgagctacaggatatacgctcacttttttgcggtcacggccgaaacgttcgaatttaacagttccgtcgattttagcaaaaagagtgtcatctcctccgcggcccacgttttcacctgggtagattttcgttccgcgttgacggtaaaggatagatccgcctgttacgaattgaccgtctgcacgtttagcgcctaaacgtttagattcagagtcacgtccgttctttgtagaacctacaccttttttagaagcgaaaaactgaagatctaatctaagcatgtaactcacctcctatatttggtttgcagtcaaccgtaagtgttcactgtaatcccgctcgatcgtttcaagagaaacaatcatgccttcaatcagcagctgcgctttttgcaaagcttcctgatcagcggcttcagggaattcaaaatagaaataacccccgtcctcgcctatatcaagaatcggttcgagaggagccagcgcgataaccgcattgaccgctccgaaaacgacagccgtgaccccggcgcaaacgagatctcgtccatgttcagcaaaatcggcatgtcccgtcatttcaaaggacaaaatgcccccgtcattccgggatcttcgaattgttgcctcaatcatgcttacgcgttgattttttcgattgtcaatttagtataaggctgacgatgaccttgttttttatgaacatttttctttggcttgtaacggaaaacagtgatttttttcgcacggccttgtttttcaactttagctgtaactgtcgcgcctgcaactgttgggttgccgactttcacgctgtctccgccaacaaacaatacgtcttcaaacgtcactgtttcacctgcttcagcagcaagtttttcgatgtaaacagtttgaccttcttcaactttgatttgttttccgcctgttttaatgattgcgtacattctctgcacctcctattagactaagactcgccagcaacaggggctttaaagctcttatcacctgtcccgagcggttgtagcattggtgctacatccataacattaaaaaatatatcagaaccaaaaggatatgtcaatctatttctagtaaggcagcagcaggtcttccatagaggaatctgtccgtttatcggcaaaatacgcatgaagcacttcattttcatcgagctggctgagcttttcgccggctttttcaatgataatggggtgcttgcatccccgtttgaattcagccatgacatgctttactttggcatcggccgcgaccgtcaaaggatgcagcatggcgacatcgcggtttttgccgtagtatctctccaaaagaaacctcagctgaatataatgccgcttccggtattcatcccataaagaagcggcgagaaagacgaacagcacccatgcgctgacctgaagggggacggccagcacaatccagcagcagagcaaaagcgcggaaacggccgatgtctgcaggctgaggagatgcgctttttgaaaagccatttgtttagagaagtataaaaacacgaacttgccgccgtcaagcggccagatcggcaaaagattgatgaaaagaatggagaggttataaaaggtaaacatctcaaatgtctgctcacttgcaaaacctgacgtgaaaaagagccaggctgccgcctgaagccacacatgctgaagcgggcccgccaaaatgaccgcgaattcctctttaagcggccggtttccgtgctcctccacctcaaccgtcccgccgaaagggagcagaaagatgcgtttaatgcgccacgaaaaaaacacagccagagcagcatgccccagctcatgaacggatacgaccagcaaaagacacagcagcgctttgatgtgccccgtcataagaccgagccccatgataatccaaagaaaaggatggacatgaattttaaaaaggaggatgagccatttattcatcaaatgtgatcacctggatcggatctatgaatttatcgccatcctggatcgcgaaatagtactggcctttacttttatcgttgagcttgatcgaaccgatctttttccctttatcgacaaaatcgtacaatgaaacgttaacatctttcagccggccgtaaatgctgcttgtattgtcggcgtgctgcaccttcaccgtcagccctgtttttttatctttgctcacttccataatgtagccttcttttacgctgtcaatggcttcactggcggtttcgacgacgacgccctctccgttattttgaaagtcctgctggattttccccgcggcaggaacggccatatcctgactgaccgccacctgaccgtccttctttttcgttcccggcgtaagaaaagcgagcgggtttccgaaggaagatacgaaccaattgcttacggcagcaaactgaaattctttttgaaaggtttgtgcgattgccggtttgatctgactcagcggctgtttgtcagttttataggcaatagcggagatcagtacgagacaggcggccagcaggcattttaaaataatagaatgagcgctgatcaatggatgccgcccgttaaattcgggcgggtgttccgtttgatattcgtagtccggaagaagcttgtgcttttcctgctccttgaccgtctgccacgcgggaaaattctgcgtttgagcgttttgaacgaaagtccgttttgattcaggccgctgttttcttcttttggccagtctttttctaatttcatcagctctgtgactcatcgccatcatcctttgcaatcgttgggtttgtacatcctatgtcttgtccattgcaaatatgcgctcttaaaaaacaaaaaagacctgataagctgggcttcatcagatctttgtattctggtatatattatgaacgcacgccgaaaaatgacttgattttcgccatcatccctttttgctgctcttcaagcacctgcaaaggaacggattctcctaaaatgcgccgggcgatattgcggtacgcaatgctggcgcggtttttggaattcatggcaatcggttcgccgatatttgaagccctgatcacttcatcatcgtcagcaacgattccgaggagatcaatagacagatgatgaacaacctcatccacatccatcgtgtcaccgtttttcaccaggtgatttctgatacggttcacgataaggcgcggcggttcgatatcttcctgctccaaaagtccgataatgcggtcagcgtcccgcaccgctgatatttccggcgtcgtcacaacaatcgccttatcagctccggagacggcatttttatagccttgttcaattcccgccggacaatcaataatgacataatcaaattcctgcttaagctcctgcacaagcgatttgatctgctcagggacaacagccgtcttgtcgcttgtctgggcagccggcattaaatgaagcagatcatcaaaacgtttgtctttgacaagcgcctgatgcgtcttgcatcggccttcaattacatctactaagtcgtaaataattctgttttcaagacccattacgacatcaaggttgcgcagtccgatatctgtgtctaccaaacagacgcgcttccctaaaatggctaaggcggtaccgaggtttgcagatgttgttgttttacctactccgccttttcccgaagttattacgatagcctcacccaatttcacattcctccctcaagccttgttagatcaggtcttaaatgagccaattgctgaaggcgttcaatgaccatatttccgtcagtatctaaataagcacattccatgtcgttccctttttgaatgtggtctggggagcgatttaacacgtgattgatcctcaattgtgtcggcatcatttcggatgcggcgatcacagcccggttatttccgttataacccgcgtgggcaatcccttttaatgaaccgagaacaaatatatttcctccggctctgatcgtaccgccgggattcacatctccgattaaaagcaaatctcccgtcacgtgaagcacctggcccgaacggacgattttggaaaccgaaacaatttcctgctcctctttcatccgctgcgcttcttctttggcgatgacttcactgtcaattgaatgcacgactaaatctttctttgacgcgatcagatcagtcagctgctctgcctgttcctgatacagataccgatgcccgagtttaatatgaacactgattttttggcctttgccatcagtatattgttcaatcgacagcatgttttgaagaccatcgaggagctcatcaaaagaacacgcatcatccagatgcaatgttaagccgttttttgttccttttattgttacatattgctgctttttggtcttcatcaatgttcacctcaacaacatactcttttcgtcaaaaaaagataaaatcctttttactcatctcttaattctttcttcagacttatataaaacagcctgaagggcaggactaatataacggctcccgcgatattcagcaaagcggtcggcaagaatcgctgaatgacaaaatcgttaaacgtcatagtgccgctgcggattaacgtctgaatgccgtagacgtaaaattcaagcacacatacgctcagcaccgcgaccagaatgaccatcagggcgtttgtctgcagcactttaaacgctttggccgccagatagcataatccggcaaaaccaaacatataaacgcctaaaacacccgtataattgatgtcataaagaaatccgaaaatgaaaccgtagatcaccgcatgcttttggttgatataagccgacataaaaatcagcgcaagcaaaagaaaatgcggaacgacctgctgctcgacggaaacgaaaggaaaacgcaccagatcggtatagatgctttccgcacaaaagaccaaaatcataatcaaagggagaaggaaacgtttcacgatccttcctcccctgttgctacgcttcggttcacgacgatgacatggtcaagatcgtacaagtcggcagccggtttcacataagcgattttcgtcaggccgtaagcatctgattctacatcggtcacttcgccgaccgtcagcccttgaggaaatacgccgcccgttccggaggtctccacgaggtcgccttttttcacttcacgtttttcatccggttcaaggatggtcattttcagggtctgtttctttttatcatacccttcaattaaaccgtagcctttgcttccctttttgccggagattttggtggccactctgttattgcggtcaacatcgctcagcagctgaacggcggatgtgaaactgttgagtccgctgcttttgatcttcccgaccagcgcacccttttcgttcgtgacagccatgtctttggccactttgtgcttcgttcccttattgatcatgatctgcttgtaccattgatcagggtttctggcgataacggtcgctaaaatcggatcatagtcggaaattgatttgacatgcccgagttcatcacgcagcttcttgttttcatctttgagttcttggagcttcgcttcatattgtgtctgtccgtccagcttttgtcttaagcgttcgttttctttgtacgtgtttttcaggtcttttatgtccccgaagaaccctgcaaaatattcggcaggcgtgtgaaaaatgttttgaaatactcccgtcgtatcaccgatcagcttttcaggccaggtggtattacggccgttcttcagcgagaatccaatcatagccaccaatatgataatacacagaagtaatagcattaaccgtttgttcggcatcgtgatacacctcttctatttaactcctgattatcttgtttttcctttgaaaagatggatgtgctccagtgcttttccagtgccgatcgcaacacaatccagcggatcttcagcgataagaacaggcattttcgtttcgtcgctgatgactttgtcgagattgcggagcagggcgcctccccctgttaatacaatacctctgtccataatgtcagcggccagctcaggcggtgttttttcaagcgtgctcttcaccgcatcaacgattgagagaactgtatcacgcagtgcatttgcaatttccgttcccgtgatttcgatcgttttcggcagacctgtcagaagatcgcggcctcggatttccattgacgcattttcttcaccggtttctgctgaaccgatttccattttaatggcttccgccgtacggtcaccgatcatcagattatatgtttttctgatatagctgatgattgagtcgtccatttcgtcaccggctacgcggattgactgagacgtgacaatgccgcctaaagaaatgatcgccacttcagttgttccgccgccgatatcaacgaccatgctgcccgtcggctcccataccggaagattcgcaccgattgctgccgcaaacggttcttcaatcggataagcgtcacgtgcgcccgcttgtcttgtcgcgtcgatgaccgcccgttcttcaacggccgtaatacctgacggcacacacaccataacgtacggctttctcgcaaacaatcctttatttttcacagcctgattaatgtagtatttcatcattgtcgcagttgtttcatagtcagcgataacgccgtctttcatcggacggagcgcaaccacgttgcccggagttcttccgatcatgtttttcgcatcgttaccgaccgcaacgattgacttcgtatccgtttgcagagcaacgacagacggctctctcactacgattcctttacctttaacaaacacaagcgtattcgcggttcccaaatctataccaaggtctcttgtaccaattccgaacatatgtatgtatcttcctttcttaaagcaaaaataccctaaagggaaaaactcataaaatctattatatcttaaatcaacgaaaaaaaaagtgttacaaatatcctttttcctttaaactcacaaattttttatcaccaatgaccaaatgatccagcagctcgatgccgattaaatttccgcactcaaaaagccgcctggttacctctatatcttccctgctcggtgtaggatctcctgaaggatgattatgaacgcaaatgaaggacgcggcggatcgtttgaaagcttctttaaacacctcccgcgggtggacaatagatgaattcagacttccgataaaaacggtgcgtttatgaatgacttgatttttggtatttaaatataaacagacaaaatgctcctgggttaaaaagcgcatatcctccatcacatacttcgccccgtcttccggagagcggatgacgcaatgctccccggcggatgtcttatgaatgcggctccccagctcaattgcggcaagaatctgaacggccttcaccgttccgattcccggaatgctggaaagctcctgggcagaggcgccttttaacaggcgcagcccgtcaaacgtccgcagcagccggtgagcgaggttcatgacggactcatgtttcgttcccgtccgcagcaggatggcgagcaattcattgttagagagatgttcggctccgaagtgcagaagccgctctctcggtttttctttttcggggaaatctcttaattttaacggcagatcacggatgatcaacccctccttgttccccttcccggtttgaacatcaagcttttatattaaattctttcaaggctctcattgttttagcgacaggaagcccgacgacagaataaaaatcaccgtctatttttttcactaaaagcgcgccttttccttggatgccgtatgcacctgctttatccatcggttcttttgtttcaatgtagagctgtatgtcgtcttcactgagcggccaaaacgtcacttccgttgtgtcacagaatgtttctttccggtcacgcgtctgaatgctgaccgccgtaatgacttgatggcttcggccggaaagcctccgcagcatctgtgccgcttcttccctgtcacgcggtttgccgaggcactcgccgtctatgcacaccatcgtgtcagccccgataacgactgcatcgggattttcggccaatacagcactagctttttgctcggccaaacattggacgttttcttccggcgaaaggtttcgatttaatttttcttctgtgcggctcgcaataatgctgtaaggaatctgaagaagattaaggagttcttttcttcgcggagattgtgatgcgagtattaagcgttttgtcatggttgtcatcctttcagggtttgcttaagaaaaaaagatacttgtctatcctaccaaatcaaacgggcaaccacaatttcagaaaaataactttttgatgacaaaataaaaaatcccgccggatgacgggaaatgagatactattttacaacacttaatagctctttttgggctttccagccggattccgaacccgacgtttccagttctttcagcgcttgaagcacggcctctttctgctttttgtcagcggcgtctgcgccgtctgccgcttttgccgcttcagccacttccgtttttgaaagatttttgccggtaatcgctttggcggagagctcagatgcctgtttaaaagagtcttccagccctgaatcgaccgcaaagctgagctcttttccgccccaagcctcaaaatcatggtctatcagtgtctgacccaattgctgtgataagcttttttccgctgcaagcccggcgatcacgtatgtgtatccgtcttcttttgccagagagacggccgagtatcctttttcagtcagctggtcaacaagcgtttgcgctcctttttctgatgaaaattttccggcctgcaccgcatatgttttatagtttcccgctgaagattccgcatctcctgtgccggctgtttcagatttgtcgttagaaacatctcccgctttcaccgtctgcccttgtgaacctttgtcagctgatgccggagcggaggcttctttacttcccgacatatttaaggcgacaaggccgagcccggtgcctaaaacagccgcaacggcaattgtcgtgaccgcttttttaactggagaagacggctgcttttttttcggaaaatgagggcctgtttttttcttctggtatggcggaacgactttcgggtcatcttcaaatacctcagaattcttctcatgatcccaattgaaatcttcttctttcggatcttcatgggaagcggcggtctcctgttccgccttttttgtttcttcccaattggaaaatgtgacggtcttctccccgccttcattcacatcttcttgtccatacatcgtttcttcttgtccgttaatggttactttaagggcattgtttttagctttgctgtgctttttgctcttcctttttttcaacgtctcttcccccttgcattcgtcttggccgtaccttgaactgatcatggttcacactttagcataggcgaaaaaaaaaagaacaagacttttgtcgtcttgtccaaaaaacgttcgccaaatttttcaagccccgcctgaagcgagcttgatgtaaaacgaaaacagctcatcaccgtataaataactcaaagcgctcccggctgagatggccggcgcaaacggaaatggctgctttttaccaagactgccccgggctgcagcgcacataccgtataccgctccgatcataacggaaagaaagaatgcaatgagcacgagcttcacgccgagcgtcaggccgatcaccccaaacagtttcacatcacctgcgccgatgcctcctttactgacaaacatgataaaaacaagcagaaaaaatccgcaaacggctccggcaaaccctgcataccatgaatccagcggagaaaacattcggccggcgatgaaaagcggaagaaaaaacagcagaactttgtcaggaatcagcatatattgcagatccgtcatagtaacaatcatgaggagagacagaaataacagcgcgactaacagttcttttgagaaaccgaaatgaatgcctgcagccgtgaataaacacgccgtccagcattccgccgccggatacataaccgacagcttcgcacggcagtttctgcatctgcctctttgcagaatataggagacgacgggcacaagctccccccaggagagcggcaagcggcaaaacgaacaggatgaacgcggcgaaataaccgagattcgcagcgggatacggcacgctgctgtataaaaaaaagaaccgaaaatcaagccgagaaaaaacagaattaaaagcactcagaccacacctttactatcaatctggctcagattatagcaaagaaaaacaccatgactgaaatggctgaaaatatattttcagcataaaaacacccggcaaaaccggaaaatggtctgccgggcatccgagaggctgtcagataagccgctttctcatctctgaaataaaatataaggagccggtaatgatgatgacatcatccgccccgtctttttgttctatccattctttcacactgtccgggttctcatcgaagctcttagatgcaagactgcttgcattgtaaagggcttcggcgcttgaagcacgcggaaagtcaaatgatacaaagtgaatggaatccgcttcggtttcaagctttttaatcatttcctgatacggtttgtcttttaatgcgctgaatacgacatggacgtttttaccggcaaagcgctgccggatcgtttctgtcagcgtttcaacaccctcttcgttatgggcgccgtccgcaaacactaaagggcggctttgaagacgttcaaaccggcccggccaggaagattttcccagtccgtttcgcatcgcttcttctgaaatgactgcggcctccaggcgattcagccattcagcggccaatatcgccaatgccgcattctgcctttggtgaatgccgatcagcgacgtttgaatgttttcatagcatttcgtttctgtttccagcgaaaagctttcgccggacggaagcgccgcttcattaaacagtctgcacgttttatatagtgactgatacggagcctgctttttttcggcttccgcttcaataacgccgagtgcttccggctgattgacgcccgtaatgaccggaatggaatttttaataataccggctttctgcccggcgatctcctcgatggtattgcctaaaatggccatatggtcatgtccgatacttgtaatgaccgacagaagcggtttcacaatattggttgaatcaaatgtgccgccgagccccgcttcaaaaatgacaaaatcgatatcagcccgcttcgcaaaatataaaaatgcacacgctgtaatgatttcaaattccgtcaccgttccggcatcggtcttatcaagctcatcgactatcggttttatgtcattaacgagcgttctccattcctcatcggtaatcggcgtgccgttgacgctgattcgctcattaaacgtaatcatgtaaggcgatgtgaacgtgccgaccgtataaccggcttcttgaaggacggaacggataaaagaaacggttgatcctttgccgtttgtgcccgccacatgaatggcgcgaatgttcttttccgggtgttccagtttttccatcagcttttccatacggagaaggcccggcttaacgccgaacttgagtctgccgtgaatccagctgatcgcttctttgtacgtattaaacaatgaaatcccctcttttatacgacaaggcggtttcttaggaaaccgccccgctgttttatcagcctttcagctctgcaatccgctgccggacagcttcgcgttttgccgtgtagtctttctcttttccgcgttcttcttcaatgacatgctcaggagcttttttaatgaatccttcgttgccgagttttttctgaacgcgttcgacttcttttgtcagcttgtcgaattctttttgcagacgggcgatctcctcatcaatgttaatcagcccttcaagcggcagaatgacttccgctccggtgacgacagctgtcatcgctttgtctgccgcagcgatatccgtcccgattttcagcgtgctcggattcgtaaagcgttcaacgtaagaacggttcttctcaaggcggccggcaatgtcttcggtagatgttttaatgtaaagttcaacctgcttgctcatcggcgtgttgacttcgctccggatattgcggacagaacggattaattcaacgagcagtttcatatccgccgctgcctctttatccgtatgttccggcaccggaaccggccaagagctgatcgtgattgactcgccttcatgaggaaggtgctgccagatttcttccgttaagaatggcataaacgggtgaagaagacgcatcgtctggtcaagcacgtatgccagaacagaccgggttgttttcttcgccgcttcatcttccccgtacagcggaagcttcgccatttcgatataccagtcgcacacatcgtcccagataaagttgtacaggtggcgtccgacttcaccgaattcataacgatccgcaagctgtgtcacgtcttctatcgtttcattcagtcttgtgaggatccacttatcagcaactgatttttcaccggacagatcaagctcgtcatacgtcatgccgtccatgttcattaatgcaaaacgggaggcgttccaaattttatttgcgaagttccatgtggattccactttttcatagctgaaacggagatcctgtcccggtgaacttccggttgccaggaagtagcgcagggaatccgctccgtacttgtcgatgacatccatcgggtccacgccgttcccaagggatttactcatttttctgccctgctcgtcacggattaagccgtgaatcagcacgtctttgaacggacgctcgccggtaaactcaagaccttggaaaatcatccgggatacccagaagaaaatgatgtcatatcccgttacaagtacatcggttgagtaataccgcttaaagtcttcagcgttttcatcaggccagcccattgtagaaaacggccaaagcgcggagctgaaccatgtatcaagcacgtctgaatcctgctcccaattttcgctgtcctcaggcgcctcaaggccgacgtacacttcttttgtttctttatgataccaagccgggatgcggtggccccaccacagctgacgggaaatacaccaatcacggatgttttccatccagtgcaggtacgttttctcgaaacggtcaggaacgaagtgaaccttctcttcttttgcctgaaggtcaaccgcagcatcggccagcggctgcattttgacaaaccattgtgtggacaggtacggctcaacaacggcgccgcttctctcactgtggccgacagaatgcatatggtcttcgattttaaagagaacgccggattcctgaagatctttgacgagttttttacggcattcaaaccggtccatgccgttatattgcagcgctttttcattcattgttccgtcttcattcatgacgagaatccgctctaaattgtggcggtttccgagttcaaagtcattcgggtcatgggcaggcgtgattttaacggcgcctgatccgaattccatatcaacataatcatcgccgacaatcggaatttcacggtttgtaatcggcagaatcaccgttttgccgattaagtgcttgtagcgctcatcttcaggatgaaccgcgacagccgtgtcgccaagcatcgtttccggacgggtggtcgcgatttcaattgagcctgaaccgtctgctaacgggtagcgcaaatgataaaacgcgccctgtacgtctttgtaaatcacttcaatatcggataaagccgtttttgtggcagggtcccagttgatgatatattcgcctctgtaaatcaagcctttctcgtacaacttgacgaatacttcacgcacggctttgttcagcccttcatcaagagtgaaacgttcacgtgaataatcgagtccgagtcccatcttggcccattggctgcggatgaaatcagcatactcttctttccacttccacgtttcttctaaaaacttttcacggccgaggtcataacggcttgtgccctgttcgcggagtttcgcttcgacttttgcctgagtggcgatgccggcgtggtccatgcccggaagccagagcacgtcatagccctgcatgcgtttcatacgcgtaacgatatcttgcagcgtcgtatcccacgcatgtccgaggtgcagcctgcccgtcacgttcggcggcggaatgacgacagaatacggctgtttcgtttgatcgccgcccgcttcaaaatattttcctttcagccaaaaatcatagcggcctttttcaatcgcagacggatcatattttgtcggcattgtttgttcgtttgtatccatgataaccctccagcatgtttagaaatggctgagcaactaaaaaagagccttcatcctgataaaggacgaaaagctctttcgcggtaccaccttttttcatgaacagatttgttcatgcacttaaacggataacgggtgcggcccgaatttctctactgtatgttcaagaaattatgctcccgggcgaccttccaatgagacggcataagaagcctttcagcacagtagcttctctctcttcatgcgtctttcttgtactcttcccgttcaaagcaggtgtatttatatcagctcatgatcttatttattatgttctttattatagtaaaagtgtttttgattcgtcaatcatcttttccaaaaaccgctgccgtcatacataaatgggcatgcaccccgctcttccccttacatacgatacatagaaaggcgaatgtgaggaggaattgcccgtgagaaaaaaattcaattcttattcgctcccccagtgggccagacaggtccgccttgtatccgtgcaagtcattattccgattacgatctttcaggggatcaggacgattttctttccgacgacttttgatgtcctgctgcttgccatcctgctgtttttagcgtgcgccctgcatttggaatggatataaaaaaacgagtcctgttatgaagaggactcgttttccgcttttatttttttctcccgctcaatctgatgaaccttcatgagaaaaggctcaacatttttcatctgccaaaacgctcttaataattgcgtgcactcttctttttcagagcccctttggccggtctgataccgtttcagcactttgtacatggcggacggataagccatatagctgagaaacagactgatttccgcttcacggagcgggaatgatttgtgatacgtataaaaccagtccagacattccggacatgctttcggatagcttctgaacattctggagtaaaagccgagcaggtcattttgcggagggcccagcgcagctttctcgaaattcgtgaaaaagcccgatcccgcatcattatacagaaagtggcggctcgataaactgccgtggttgatcaccgctctcgtcttgtcatgatcctttgccgcgtcaaaccattcttccagacgttccagagcaaaattgacggcggaaaccgtttctgtaagatacgtaacggcctgcagttcaaaaggtgaaaggtaccactctttttccgcccggtcggcgaattgttcatagacaagcttatcattttcccaatctcttttcgttgcttcataaaagccgctgatatcttcagtccggatttggatgtcccgcacagtcgcagaatggagcttcgcgacctctttaaaaaggtaaacatgtttttgatcccgttcttcctcctgatcgtactgaagccaaggcattaaataataagaattctccgtctgtctccccgcaaaaaaatcgccggcatacgtgcggcagatcggcacaaatgatcggtagcctttctcctcaatctcaatcataagatccgtaaattcactgctgcgggccggcttgagctgtttcaaagcaaaaatgccgtagtttgagtagaccttccaaacatgcgggctgacaggctcaatatactcagccgccagcccgtattcctgaagcactgattggactgcttccattccattcaccacatttttacggcctctttgtgcttacacatggctgttattatattcaggtatatacagaagctgaccttcctcaagctcgtcatcaaacgataaagcattcgttcggatgagctgctgggatgtaatgtcatatcgttcacacacccggtcgattgtatcttgctgctgcacgatacaaattttcattcttgaaaacttttcttcttcccttgtaaataattttgtcaagtaatgagagttgtcattttccttctgctcggttcccggtgccgcttcttcattctttctttcaggcttaagcggctcaggctgttcagcttgcgccggctcctcaggcggcagtttggaaaactgaaaagacaaatcgagaggcttcccggtttcctcctccggcggcgccatcttccttacctcaatttcaaacccttcttcaccatgagcctcttcttcaagcagcttaggagcgctgtaaaactcctcttcctgccgttccggaacgaactcgcgataaacgggcgcctgctcctcttgaaaaaccgcaggctcatcttcgtcttctgccgccttatgatcgctctgacggagaagcggctcggcctctggctgctcttctttttgaaggaagggctgttccgcaatttttggtttttctgcatgcggagtcagagtgaaagcagggaaaaccggttcgatatcatctttcggctcttcctgcacttctgctgaatcatcctcaaatacgggttcattcctcacagctgacatgattgcaggctcctcagcttcttccggctcttcttcgtgctggaaggaaacgggaggaggaggctcagtaaaggaaacaggtttaggcacctcttcttgctccctcagaatcggggctgcttcctgctcttcttcttcttgctccctcaaaaccggggctgcttcctgctcttcttcttcccgctccctcaaaatcggagctgcttcctgcgcttcttcctgctccctcagaatcggggctgtttcctgcttttcttcttcccgctccctcagaatcgggcctgcttcctgctcttcttcttcccgctccctcagaatcggagctgcttcctgctcttcttcctgctctctcagaagcggggctgcttcctgctcttcttcctgctccctcagaagcggggctgcttcctgctcttcttcctgctctctcagaatcggggctgtttcctgctcttcttcctgctccctcagaatcggggctgtttcctgcttttcttcttcccgctccctcagaatcggggctgtttcctgctcttcttcctcctgcctgagtaaaggcgggatttcttcctcgttcttctctgtttcttgtgctgcttcttctgatacagtcaaaggtatttcaggctcatggcgtatcattaattctggttcattttcgtcctcagaatgatgtccggcaagattgatcatttcttctctggaaaattcaggcgccacgtacaaagggatctccggctctttcggctcggattcctcaagcagcccttcaattgccaaatcagcttgaatggttaagatccttgaatccgtcagctgataatcaaaggcatcaataaatacgaaaacatcattgaggtggctcactttatttttcggaatcgtgatgtccaccgggaaacaatgaatgagctcggccgtgccatcctccctcgccctcacttcctctacatgcctcagctccctatcaagctcttcaaaatgactgctgtgatctatgttgtactcgccagtaagttctaatgatcctttaattgagacataatcatttacttcctgcaccctgatgtcagggtctaatgaaatcgaaagtaattcagaaacttcctgtcctttttggaaacagattgattcttcaacagaaaattgcaatcggtgattatgcggcaagttcatatcctcctttcatctaatccatacaattagatgtcactaaaggtgtatgccgcaatccgggaaaatatgataatggaggcattgaaaaaagccgatacaagtcttgcttgcatcggcttttcggtatcagcggctgatcgcctggaacactttctcagcggcttgaatggtattttcaatatcctccattgtatgcgcagtggagagaaacaatccttcaaattgagacggcggcagaaatacgcctgcgtcggccatccctttataatacttggcgaacagctttaaatcagaagatttggctgcttcatagttaatgacaggctcattggtgaaaaagaagccgatcattgaccccgcccggttaaacgtgtgcggaatgccgtgtgctgcagctgcttttgaaatgccttcttcaagcatatcgccttttttcacaaattcttggtaagattcaggtgtgagctgctgtaacgtctcaagtcccgctgtcatggcaagcggatttccagacaatgttcccgcctggtagatcggaccgctcggcgcgattcgttccataatgtcagcttttccgccatacgcaccgacaggaagaccgccgccgatgactttgccgagacacgttaagtcaggcgtcacgccgaaatacccttgcgcgcagttataatccacgcgaaaaccggtcatgacctcatcaaaaatgagcagcgcgccatactgttccgtaatgtcgcgaagtccttgtaaaaagccttcctgcggcggaacaacgcccatattgcctgctaccggttcaacaatgaccccggcaatatcttcaccgtactcccggaatgcgagtgcaacgctttccaagtcgttgtatggaacggtaatcgtattcattgctattccttccggcacgcccgggctgtccggcaggccgagtgtcgccactccggatcccgctttgatcagcagcgaatcaccatggccgtggtaacagccttcaaatttcaaaattttgttgcggccggtgtatcctcttgccagacgcagggcgctcattgtcgcctctgtgccggagctgaccatccgcacgatttcaacagacggtacacggtcaatgaccaatttggccagttcgttttccacttcagtagatgccccgaaacttgtcccgttctcggctacttttttcaggctttcaacgaccctgtcgttcgtgtggcccaaaatgagcggcccccagctcagcacatagtcgatatattcattgccgtcaatatcaaaaattttcgatcctttgccgcgctgcataaagatcgggtccatatcaactgatttaaacgcgcgcaccgggctgttcactccgcccggcatcagtttctgcgcttctttaaaagcggcttttgatttttcatagcttctcatctgcctcagctcccgtcaaatgaaatcgttactcagcaagccatttcgctgcgtcttttgcatgatacgtcataatcagatcggctcctgcacgtttcatgcccgttaaaatttccagcaccatttctttttctttaatccagccgttttgggctgccgctttcaccatggaatactccccgctcacattatatgcgaccagcggcaggtgatggcggtttttcacatcacgcataatatctaagtatgacatagacggtttgacgattaaaaagtcagcgccttctgccgcgtctgattcagcctcacgtagcgcttccaggcggttggccggatccatctggtatgtttttcggtcaccgaactgcggcgtgctgtcagccgcgtcgcggaacgggccgtagaattcacttgaatatttcacggcataagacatgatcggaatattcgtgaatccttctttgtcgagcgcttccctgatcactgtgacaaaaccgtccatcatatttgaaggagcgatgatgtcagcgccggctttagcctggctgacggctgtctgcgccagcagctcaagcgactcgtcattgaggattactccgtctttcacgaccccgcaatggccgtgatccgtgtattcacagagacatgtatcagcgatgacgatcatttcaggataatgctttttaatttcagcaatccctttctgcacaatgccatgatcgtgaaaagcctgggttccgcaggcgtctttttcttccggcacaccgaaaacgatgaccgacttaatgccgagcgatatcagctcagccatttcatcctttaacaaatcgagtgatacatgataaacccccggcatggaaggaacttctttttttccttcgagtccttcaacgacaaataacgggtaaataaaatctgaagggtgaagacgtgtttcttttactagatctctcatcgcagcgttcgcgcgcaaacggcggtgtctgttaaatgtttgattcatcattatctatcctttcccgacatgctgcacatgacgtccagcatgccttcaatcgtataggtgtcaggcacatgggatgagatcccgtattccaagagcgctttctctgtcaaagggccgatgctgatatagctcgcaccgctgttttcccacgctttttctccgtctccgaccgcgtgcataaacgtatgcaccgccgatgaactggtaaacgtaataaaatcaaaatgagagcgggatgcagcccgtctcagctcgtccatgcctttttcatcctgaatggtattgtataacacccattcccttatttgatagccaagcggctcaagctccgcttttatgacatcgcgtgataaattgccctttatcaatgaaacgggttcggcagctgatgcgtgccgttttaaagtatcagccagacattccgccacatactcgtcaggcatcgcatccgtccgggctccccgctctttcagggcgcgcgctgtcttttcaccgacggctgcgatttttttccgttccggaagcgcaaggccatgctgatcaaggtaggaaaaaaagaaccggacaccgtttacgcttgtaaacacaagccagcccggttcagaaaggtcttcccgcagactgtccgcacattcatccgggagcgcttcctgaaaagcgatcagagaggcggaaacagccgttccgccgagcgcctccactttttttcgaaacggtgctgcctgtcttttgttccgggtgacgagcacggtctttccttgtaaaggaaggtcatttgccatcctgttcgagctcctgtttcacgctgtcgattagtgctttggctcctttttcagacatcatcgccgcacagcgtttcccgatttcttccggatcatgtcccgccgctgtttctttataaatcgtctttccgtccggagacgcgacaagaccgaccaattcaacctcatcccggtcattgacggacgcatacccggctatcggcacttggcagccgccttccatcgcgtgtaagaaagcccgttcggctgccaccgtgcgctgcgtatactcatcggtaaattgcgcaaacagcttcaaaagctcttcatccgactctctgcattcaatggcaagagcgccttggccgaccgcaggcagacagcggtccggttcgaggaattccgatacgacatcatctttccagcccattctcgaaagccccgcagccgctaaaataatagcatcgtaatcttccgtttcaagcttttgaagtctcgtatcgatattgcctctgatccacttaattgtaaggtcagggcgttcagcaagaatctgggcgcttcttcttaaactgctggtgccgatgatgcccccttcttttatgccgtccagcttttgatgcccttttgaaatgagcgcatcacgcggatcctcacgtttcggtatgcagcctatgacaagaccctcaggcaaaacggcgggcatgtctttcatgctgtgaaccgccatatcaatctcctgatgcagcagcgcctgttcaatctctttgacaaacaaacctttgccgcccacttttgacagtgtaacatcgaggatgcggtcgccttttgtgacaatctcccggatttcaaagtcataggaaggattcaattccttcagtttgttaatcacccattttgtctgggtcatagccagtttgctccgtctggaacctaccttaatcgttctcattttctttcctcccgaatctgtttgggcgcgtgcgttaactgaaccaatggaattgtgacaggcttccgagcaggaagtaattaatcatcagcacgagaaaacatgctgaattccataacgccgccactttcccctgcagttccttaatcattctgatatataaatagtagctgtataaaagcagcacaataaacgagccgagcacttttgagtcaaaccagtacagcgtttccagcgacacatacgcccagatcacgcctaatatcaggctcaacagcagcatcggaaccccgatgacatttaaaacgtaagccatataatcaagttttgacaaatcttcaattctcaacagccattttccccattttttcttctttaataaagaatattgaaactgataaagaagcgaaaagacaaaagaaagggaaaaagcgccgtaagacagaatcgccattgtaatatgaatgaccaaaagctctgagaccagctggccggaaaaggcggccgaatgctgatccgtcggtgaaaacgtatggatcgcaatcatcgagaaaccgatgacattcgtgaaaaacacgataaaatcaacccgcagaatctgcgtgaccacaagtgaaagcgtgacaagcacccacgcataaaagtaaagggcctctgtaatattcaagaccggaaatctgcccgtctgccacatgaaataagaaagatagacagtttgcagagtccagacaatagaaagcaaccagaaggctatttttccagccttccggttgtgttgaagaaaatctataaagtaaaaaaggacgcttactgcataaataacaattgtcgcttcattaagtcttgccattgctgtatcaatcatacagccctcactcacttacaagcggacgtaagcccgtttttgcttctgccttttgaaacgaatgaaccgtctggcggttatccaggcttttgtccagctggcggccggcctcttcctcaatatcgaaaatctgcataaacagcttcagcttttcatctgaatccgcttcagccgcaagctctttcgctttcagaatcgggtcgcgcagcatttggttaatgatgcttttcgtatgtttgctgagaagttttttctctctcaccgtcagatgaggcagcttgcgctcaatgctctgcatcgtatcggactggatggacagcgccttttcacgcagcgccgaaatgaccggcacgacgccgagcgtattaagccactgcttaaactcaacaattgccgcttcaataaacagctcgactttttcagcggtttcgcggcgttcttgtaagttggcttcaacgattccttcaaggtcatcaatatcgtacagaaaaacaccttcaagatcgttaagcgccggatcgaggtctctcggcacagcgatatccaccataaataacggacggcctttccgctgtctgcccgctctctccatcatttctttagacacgacgaaatcactcgcgcctgtcgaactgattaaaatatcagcttcagcaagtgcatattcaagctggtttaagctgcgcgcttctccggagaaacggtcagcaagcgcttttgccttcaaaaacgttctgttgatgaccgttactttgccgataccctgaccgtgcaggttttctgcggcgagctcgcccatttttcccgcaccgagaatcaaaatgtgcttatttgacaatgagccgaagatttttttcgcgagttcaacggcggcgtaactgacggaaacggcattggagccgatatcggtttcggcatgcgtgcgtttgccgacggtcaccgcctgtttaaacagctcattgaaaatggtgccgatcgtcttttctgcctgcgccgttttaaagctcgagcgtacctggccgagtatttgcgtctctccgatgaccatggaatctaaaccgcacgccacacggaataaatgctcgatcgccgcgtcgctctcataaaatttcagaaacggagacagctcttctttcggcagcgagaaccattcggataaaaatgtctttatataataacggccggtatgaagctggtcgaccaccgcatatatttcggtgcggttgcaggttgacacgataatgttttctagaacgcttttttcttcttttaagcggagcatcgcttctgcaagctcatccggctgaaaacttattttttcgcgtatttcaataggggcggatttataatctactcccacaacaagaatatgcatcgctttcatgcacccccgtacatcgcaatttatttataatcattctaacatagaatttattatttataataattataacatagtttcttcgggaaaatgtgaacagatttcaaaaatgttatgctatagtataaaaagctcgttcccactgtaatcatcatactaaaaatcctttactgcgggtaggtgacaggatgaaaaaaacatcaattttattaccgggacttctgcttgccgcttcattatttgcatggcttcagagcggacaggttcacctgtttgcgaatcaggggaatggccggtgctccttatgctcttgggggctgtgctcttgtatcagggcaaaaaggaagcggccgggcctcacgtcctgatcggcatgcttcttttcggcataggtttacactttttcgccaaacctgagctctcatggtggccgggagattttgaaatgattctcttcgtcttcggattctccttatttgcggctgccagaaaagaatatgtatacgaagcggctgccatgattggtttttccctctttttatacttctttaaacaaattacggcgtggctggagtccgtccatattccgacggaacacttcaaaacatactggccgtatgttttcatcggaatcagccttttattattgtttatcaagcggaacaaaactatacgataaaacccaaaacgcactgcgttttgggtttttcattaccggctgatcatttttttaatggctccccatgcttcatctttgccttttttcgtttcagaggaaaataaaatcagctcatcttcaggatccatatcaagcgtctgtttgacaacctttaagtgcttgtcccattttccttttggaatcttatccgcttttgtcgcaatgacgatgacgggaatgccgtaatacttcaggaattcatacatgttcacgtcttcagcagacggcgcgtgtctgaggtcgacaatctgcacgcaggctttcagctcttcgcgggtcgtcatataggtttcaatcattctcccccatgcttcccgctcgcttttggaaactttcgcaaatccgtacccgggaacgtcgacaaaatgcaattcatcattgatgatgtaaaagtttaaagtctgtgttttccccggttttgatgacgttctggccaagtttttccgattgattaatgaattgataaaagatgactttcctacatttgatctgcccgccagcgcgatttccggaagccccccatcagggtactgttcgggtttgaccgcgctgatcacgatttctgactttgtgactttcatttcttctctcctactaaggcatgttccaaaacgtcatccaggtgagaaacgaatataaacttcagtccttctctgacgctttctggaatatcctctatatctttttcgttatctttaggcgcaataatagtggtcaggcccgctctgtgcgcgccgagcgccttttctttcagtccgccgatcggaagcacgcgcccccgcagcgtgatttctcccgtcataccgacttcgcgttttaccgcacggtccgttaatgctgaaacgagcgccgtggccatcgtaattccggcagaagggccgtctttcggcaccgctccttcagggacatggatatgaatgtcatacttctcatggaatttcgggtcgattccgaactgttccgctttcgaacggacataactgaaagcggcctgcgctgattcccgcatgacatctccaagcttccctgtcagaaccagctttccttttcccggtgacaatgacacttcgattgacagcgtatctccgccgaccgtcgtatacgcgagccccgtgacaaccccgatttgatcttcggtttccgcctgtccgtatctgaatatccgttttccgagatagtcggccagatttttctctgtaacggtaatgcgttttctctcctcagacacaatggctttcgcagcctttcggcaaatggcggcaatctggcgttcaagcgttctcacgccggcttccctcgtgtagtagcggatgatgtccgtaatcgcctgatcccgaatctgcaggttgctctttgtgagcccgtgctctttgatttgtttcggcagcaggtgatctttcacgatctccagcttttcgttttcagtgtagcctgacaggctgataatctccattctgtctctgagagggccagggatggaagcaaggttattcgcagtcgcgataaacagtactttcgataaatcgaacgtctcttcaatatagtggtcgctgaatgtgctgttttgttccggatccagcacctcaagcatcgccgaagacggatcgcctctgaaatcagacgacattttgtcgatctcgtcgaggagaaagaccggattttgtttgccggcttttttcatcccctgtataatacggcccggcatcgccccgacgtatgtgcgccggtgcccgcggatttcagactcatcgcgcactccgcccagtgaaattctcacaaaagtgcgccccatgctcttactgattgattttgcaagagatgttttaccgactcccggaggtccggccagacaaagaatcggccctttcagcgttttcgtcagctgtttcacggccaaatactccaaaatccgctctttcactttctctaagccgtgatgctctttatctaagatttccccggcttttttaatatcaagtttatcttctgtttcatccgaccacggaagggcgatgagccagtcaatatagttgcggataacagagctttccgctgagcttgacggcactttttcgtaacggcttaattccttaagcgccgtttctttgacacgctcaggcatgcctgcttcttctatcttttccgtgagcgactgaacttcgccggtttttccttctttgtcgccaagctccttctgaatggctttcatctgttcgcgcaaataatattccttttgagtgcgttccatcgaacgtttgacgcgctgaccgatttttttctcaatctccagcacttctttttcattatgaatggaacgaatgaccttattcagacgttctttaatatccgccgtttctagaatgtcctgcttgtcctttaatttcagcgggagatgagaagcgacgatatccgccattctgccgggctcttcaatatcagtcacagccgcatacgtttctgcggaaatttttttagaaatttttatgtactggtcaaaatggtccagcagcgtccgcataagcgcttcgtcttccacgtcttttgaatcatcctcatgcatcagctgtatatcgaccgaagtataatcttcgagttcggtgtattcaaggatctgcgcccgctgaattccttctacaagcactctgatcgtaccgttgggcagcttcagcatctgtttaatttttgtataagtgccgacggcgaaaatatcctcttcacccggttcgtctatcgaaatatcctgctgagtggctaaaaaaatcatatgatcatgcatcattgcctgttcaagagcctgaaccgacttgtcacggcctacatctaaatgtaaaaccattgtcgggtataccaataagcctcttaaagggaggagcgggatgctgcgttttgtatcttctgccatgtgactgacacctccgtgactttagtatgaaccattataatacaactttttcatcgttgtacaattccgggatcgggctttaatcggcttatccgcctgccctgtatataaaacagtctcttcgtagtataccctttctttctgttctgaaaaaggaaaagatgtcctccataaaaaaaccccattataaaaatggggtttatacggattctttattcatttggatatcaaacggtttttgttctgaaggagggtcaaccaatatgacgtcaagcacttcctggaacgtttttaccgctttaatggtgattccgtctattcgtttcagaatggactgctgattttcataagggataatgaccgtttttgctccggcctgttttgcggctttaattttcggaatgacgccgccgatcggtttgacaagccccgtcaggctgatttctcccgtcatcgccaccgtatggtcgatcgggatgcggtgaatcgcggaaaaaatccccgcggccatcgcgatacctgctgaaggtccgtcaatcgggcctccgcccggaaaattgacgtgaatgtcatagtctgaaggtttgatgcccattgtgcggagaaccgtcagcacattttccacagatcccttcgccatgcttttgcggcggatcgacttcgattggctgccgatgctttcttcctctgcaattcccgtgatattcaggcttcctttgtcctgcgcaggtgtgacattcacttcgatttccagcaatgcgccgctgttcggcccgtagacggcaagtccgttcacgatgccgacttgcggttcatcggcgattttctgctcatttttaggtgtgagctgactggaatgaacaacccattctatatcttcagtcgtgatttcttttctgtcctcagtcaccgccatgccggcagcgatctggatcatattgacggcttcacgtccgtttctcgtatatgcggtcagcacgctgagagcttcgtcagaaatctctttctgaattttgtcggctgcttttttcgcaacgattttaagttcatccttttccagctcgcggaaaaatacttcaagacagcgcgaacggatggccggaggaatttcagtcggcattctcgttgtcgctccgatcaaacggaaatccgccggaagcccattttgaaaaatatcatggatgtgattcggtatttgcgtattttcttcactgtaatacgcactgtctaaaaatacttttcggtcttcaagcaccttcagcattttattcatctgaatcgggtgaagctcgccgatttcatcaataaacaataccccgccgtgagcatgggtcacagccccctgtttcggctgcggaatgcctgcttggcccatcgcacccgctccctgataaatcggatcatgcactgaaccgataagcggatcggcaatcccccgttcatcaaatcgcgcggtcgtcgcatcaagttcaacaaaaacagcctgcttttgaaacggtgactgtttatgctttttcgcttcttccaataccaaccgcgccgcagccgttttaccgactcccggaggaccgtaaataatgacgtgctgcgggttcggtccgcaaagcgctgcttttaacgctttaattccgtcttcctggccgacaatgtcctgaaagcttttcggccgcaccttttctgataaaggttctgataaactgatggcgcgcattttgcgcagctgttccatttccttttttgattctttatctatcgtcactttttgtgttcgctggtttttgagcagattccaaaaatatagtccgatgactatcccgaaaaacagctgtacaaataatgcgatccctgtccaactcatgctggtccctcctgaaaaaacgatttatgtatccaattcattcctctgtccgctagtatctcccagcaaagcccggaataaacattttcagaagggtcaggacaagaaaaaaacctcctgattaattcgggtcaggaggttttgtcgtgttatgctgatgttttatcttggccgacaacagtaccgtcttttaatacaagacgcggcgcttcaccgtctgcgactgtcgctccggtaatgacacatttttcaatatcatcgcgggacggcagatcaaacatgacgtcaagcatgatgccttcaatgatagaacgcaggccgcgtgcgcctgttttacgctcgatcgcttttttcgcaatttcagataatgcctcgccttcaaattcaagctcgacatcatcaagttctaacattttcttgtattgtttgacgagtgcgtttttcggtttagtcagaatttcaaccagtgccgtttcgtcaagctgctcaaggcttgcaatgacaggaagacggccgatgaattcaggaatcagaccgaaacggagcaggtcttccggaagaactttagaaagcagttcttctttttccaggtctgccgctttattatcagagccgaagccgatgactttttgtccgagacggcgtttgatgatttgttcgatgccatcaaatgcaccgccgcaaatgaacagaatgttcgtcgtatcgatctggatgaattcctgatgaggatgtttgcgtcctccttgaggcggcacgcttgcaaccgttccttcaagaattttcagcagcgcctgctgaacgccttcgcctgatacatcgcgtgtaatggacgggttttcagattttcgcgctactttatcgatttcatcgatatagataatgcctttttctgctttttccacatcatagtctgctgcctgaatcagcttgaggaggatgttttctacgtcctcaccgacatatccggcttcagtcagagatgtagcgtccgcgatcgcaaacggaacgttcagaatacgcgcaagcgtctgggcaagaagtgttttcccgcttccagtcggtccgattaaagaaatattacttttagaaagctcaacatcatccactttactgttggaattgatgcgtttgtaatggttgtataccgcaaccgcaagtgatttcttcgcctgatcctgtccgatgacatattcattcagaatctcacggatttcctgcggcttcggaacgtctttaaattcgacttcttcttccgtaccaagctcttcctctacgatttctgtacagagctcaatacattcgtcgcatatatatacacccggtcctgcaaccagcttacgaacctgatcttgcgtttttccgcagaacgagcatttcaattgtcctttttcctcgttgaatttaaacattctttcaccccttaatcttgtctcactttttcttttacctgaagggcaaaagaaaacggttcttgctacgatcgagtatgtattgcattttaccatactttccagtaagacggtaacaatgtgtttcgcacttgcacattctatatgtatgacgaaaaacagcccggcaatgactatcttgccccaagaaaaagagttatatcataattgtacaaaacaaggcacgaattaatcgcgccctgttttattatgtctattattatgaaccatattaacggttttctacaagaaaatcaattgcttttcgaacttttaaatcttctttcatcgcgtcagttgaaccgattgcctgcttgatgttttcaaccggcatgttgtaagcttcagccattttagtcagctctgcttcaacttcttcgtccgttacttcaaggttttctgcttgagcgatcgcttcaagagtcaggtttgattttacgcgttttgcggcatcttctttcatttgctcttttaacgcgttttcgtcttggcctgagaattgagtgtaaagctcaaggttcatgccttgcatttgcagacgctgttcgaattctttcagcatgcggtcaagctcagtgtcgatcatcgcttgaggaacatcagcttcagcgttttcagatgctttcagaacaagctcttcacgcaatttagcgtcagcttcgttttcttttgcttcttcaaggcgtttttttgttttctcggttaattcagcaagcgtttcaacttcttcgtcaatgtcttttgcgaattcgtcgttaagctcaggaagctctttcgctttgatttcatgaattttcactttgaaaacagctggttttccggcaagctcttcagcgtggtactcttcagggaatgttacttcaacatccttttcagcgcctgcttcaaggcctgttaactgctcttcgaagcccgggatgaatgaacctgatcctacttcaagtgagtagttctcagcttttccgccttcaaacgcttcgccgtcaacgaaaccttcgaagtcaagaacgactgtatcgccgttttcaacagcgccttcttctttcacgacaagctcagcctgacgctcttgaagcgctttaagttcgttttgtacatcttcgtcagtaacggcagtgtcatctttttcgattcctaagcctttgtaatcgccaagtttcacttccggttttacagtcacttttgcagtgaaaattaagctttcgcctttttcgattttttcaacatcgatttcagggcggtctacaggctcaatgccggcttcttcaaccgctttagggtattctacaggaagtaaaatatctaaagcatcctggtaaagagcttcaacgccgaaacgctgttcgaataaaccgcggggaactttccctttgcggaatccaggaatagaaacctgttttactacttttttaaatgcatcatcaagagctgttttgaacgtatccgcatcaacttcaaccgttaatacgccttcgttgccttcttgtttttcccattttacagacatgtgtttccctccaaaaatctattcaggttgtgtcggtcttccattctaaagcaatccgcggctttgtcaaagaaaaaaccgctttgaatcagaatcattatgtaatgaactggcagcctgtccaaccgtaattctcatttcagttaaaccgctatacataaatacaaccactatattataacataacgcctaccgctttcaactatatggtgtgatttacaaataagaaatttcttcaatatccttaatcatcgtgcaggcttcttcgagttcgcggctgtcaaactcgtacatcatatgaagttcctccggctcaatgtcaatgccgtgcatctcgtaaccgaccttatgaagcgccgccgcccataaatccgcgttcaaaaacttcggcataaaagggtgcaggacgtacagatgtcttctccacagctcctcgacggcagcatataatgtagggttttcattgcccagcgtttcatcaagcacccggagaacgcgatgcaaaatcggagccgcatcaggctggaccgtttcactcggtatcgcggtcattgaatcgccgaattttgtaatatggaccggtttactgtagtcgtgctcggccatcagcgtcaaaatcattgtcttaataagaggatgcgcgcccggatcttgaagaatcgtttttaagagacccgtgtattttgcaatattgcggtctttaagagaatgaatcagattcatttgttcagcggggctgttcagcactttttccgtatcaagaatgtcctcgtattcctcctcccacgcctcctcctgctgatcgggatcggtcattttgcggctgaattcgagcagccggtagaattgctccgcactttctgcgggcagctggttttcttccagcacagcttcaattgtgcttttgacttcttcatattgtttcagctgaattaaaatggtcatgtacacctgcaatacggtgaaataatggccgtacccttcattcagcattttctcgcaaacttgttttgcttcttccaattccccgagttccagaaaacaaatcgccatgcctaaatgtacgtcggactcggtatcgccgtggcttaccgcctctgaaaacagttcgagggcctcctcatactgtttatccttcatggcggccatccctttatcaaccaagcgttctttcagacgggggaaaggaatgatatcagcttttttcttgtcatgcgtcatactttatttcctttcaggcgcttattttgttcaagtgtatcaacacgcgtcatgaaacacaagaaaggatgatgcacacggtaaaaaaagccgccggacagatgccgggcggcttttttcaggcttgaagccatgaacttcttttcgattcaaactgctgaatgtcgtcctccagcagaagcgttaatgaaatttcatcataaccgttaatcagcatttccttccagtgcggatcgacttcaaatgaaatctcttttccttcactgtcgtgaatgagctggttttccaaatcaaccgtcatatttagagactgattttcatattgaccggcgagttttttccactgatcatacggcatacggatgggaagcataccgtttttaaaacagttctgatgaaaaatatcggcaaatgacggagcaatgatgattttgaagccgtaatcatccagcgcccaaggagcgtgctcacgggatgatccgcagccgaaattctctccggcaattaatatggacgcgccttcatagactttgcggtttaattcaaattcaggatcaggctcaccgttctcaaggtatctccaatcaaaaaacgcgaatctgccgtatccggttctttcaattcttttcaaaaactgtttcggaataatctggtccgtatcgacgttgatccggtttaagacggccgcttttcccgtatgcgtttttaaaggttccatcttttcgcgcactccttacacaactgttttttcttgataaaactttcttacatcgacgaaatgcccgtgaatggccgccattgccgccatcgccggactgacaaggtgtgttctcgcgccttttccctgtctgccttcgaagttgcggttggaagtggaagcgcatcgttccccttcaggcacgacatcattgttcatactgaggcacatgctgcagcctgattccctccattcaaagccggcctcgagaaacacgcggtgcagcccttcttcctcggcctgctgtttcacgctttgagaacccggcaccacaatggctctgacgctgtcggcgacttttcggcctttgatcatatccgcagcctggcgaagatcggtcatccgtgaatttgtacaggagccgataaacacatgctcgactttaatatcttcaattttttgattcggcgcgatccccatgtattcgtaagcgcggatggcttcttttttaccgtcttcagaatcaatcgtttccggcgcaggtatttgggcatcgaccggaagaaccatgccgggattgacaccccatgttaccattggagaaatctcgctgccgtctaacacgatggaatgatcgtatacggcgcccggatcggtttttaacgctttccattctgcggcggctttttcaaattcctcgctttttggcgcgtatttacggtttttacagtattcaatcgtcgtgtcatcaggagcgatcagtcccgcacgggctcccgcttctattgacatattgcagacagtcatgcgttcgtccatagacatgtttctgaatacttccccggtgtattcaatgacatatccggtaccgaatttcaccccgtattttccgatgaccgacaagatgacatccttcgctgtcactcctttttggagcgttccgtcaacgcggatttcaagcgttttcggccgctgctgccataatgtctgtgtggaaagaacatgttccacctcacttgtgccgataccgaaggcaagcgctccgaacgcgccgtgagtcgatgtatggctgtctccgcaaacgatcgtttttcccggaagtgtcagaccaagctcaggcccgaccacatgaacgattccctggtctgcgctgtgaagatccgcaagacggacgccgaactcctcgcaattccgttcaagcgcggttacttggcgctttgcgacttcatctttaatgtcaaaacggttgacggtcggaatattgtggtccatcgtcgcgaacgtgttctgcggccgtctgacctttcttcccttctgccttaacccttcaaacgcctgaggagacgtcacctcatgaatgaggtgcagatcaatatagagaaggtcgggttttccttcaccgctttttacaacatgccgatcccaaatcttttcgatgattgttcgaggcatcatctttgtttcctccctctacctattgaactaagaccgctttctttaaagcgtcatactatagattttgtattcgagccggctaatgcggcttttactttttcagtaatgtcatgcgttccggcatattggccgtcccgggcgatatcacgtgtacggctgccgtctgcaagcacctttgcgaccgccttttccaccgcctgcgcttcgttttcaagtccgaaagatgttctcaaaagcatcgccgctgataaaatcgccgcaaacggattggccatccctttaccggcgatgtcaggcgcagatccatgcacgggttcaaacaagtgaagacctgaacttgataaactggctgacggcagcatgccgagcgagcctgtcagcatggaggcttcatcgcttaaaatatcgccgaacatattttcagttacgatgacgtcaaactggctcggagcgtagatgagctgcatcgcggcattatcgacaagcatatgttcaagcgtcacatcaggaaattcttttgcgatttcatctgccgtttcacgccacagtctgcttgaagaaagcacattcgccttatcaacggacgtcacttttccttttctgccggcagccatcttaaaggcttctctgacaacgcgtgcgatttcttctttcttataaaaaagggtatcgaccgcttccttttctcccgcttcattgacatactgtctgctcggttctccgaagtagaggccgcccgtcagttccctgacgattacaaagtcgacgccgctgatatattcttttttcagcggagacgcctcagacaggctttcaaatacggtcacaggacgcagattggcaaacaggccgagcttttttctgatgccgagcaggcctttttccggtctgagctccggagggttttggtcccatttcggcccgccgactgccccgagcaggatggcgtcggatctttcacaaagagccaccgtctcctcaggaagggggttttgatgggcgtcaatcgctgctcccccgatcagcccgttttcaaattcaaattcatgtccgaattgttcagcaacgcttttcaatacatctgccgctgattccgccacttccggtccgattccgtcacctggaagcaaagcaatgcgttttttcaaatcaaacgttctcctttctattacgagccgaccgcagtccgtctctttaatccgtctaaattgcaatccagcaccaactgccgattcacggcgttcagataagctttagcagaagcttccagaacatcctgcgcgattccccgccctgatgtttcttttccgttcacggtcactctgacataaacttgagccagcgcgtcttcgcctttccggttggattggatgcggtagtctgtcagttcaatatttttatcgatgcagcgcccgagcgtattataaacggcttctacgctgcccgcccccgttgccgcctcttgaatcagctgttcgttttcctgatttttcaaagagactgttgcagtcggcacctgagacgttccgtaatgcacttgcagagacagaaattcatagccgatttttttgtccgtcactttttcttctaaaataagagaaatcaagtcatcatcggtgatttcttttttcttttcggtcagttctttaaacatcgtaaaaaatttattgatttcctcactatcaaactggaatccaagcgcattcaggcggtctttgaacgcatggcgtccggaatgctttccgagtacgagcgcatcagcagtcacgccgacaagttccggtgaaatgatttcatatgttgatttttctttcaggaaaccgtcttggtgaatgccggattcatgtgcgaaagcgttatctccgacgattgctttgttgcggggaacggccatgcccgtcagtttgctgacaagatcactcgtccgcttcaattcatgaagattgagagatgaatcggcttgatgcgcgtcatttctgacatgaagcgcaacggcgatttcctctagcgcggcgttcccggctctttctcctatgccgttaatggcgcattcaatttgatcagcgccgttctcaattgccgaaagtgagttggcaaccgccattccgagatcatcgtggcaatgggcagagagctttacccggctgatattcggaacgtgttccttcatatatttaaagatgtttccgtattcagcaggcgtcaggtaacctacagtgtccggcaggttgatgacgctcgcgccggcatcaatcactttttctacgatttcagccagaaacggaagttcggtgcggcatgcgtcttctgccgaccattgaacgatcggaaagcgttcttttgcatacttcaccatttcaaccgctttttccttaacctcttcccgcgtcattttcagcttatgcttcagatgaatgtcagaggtggcgataaagatgtgaatgcgcgggctgaccccgtctttcagcgcttcccaggctgcgtcaatgtcacctttgacagatcgagcaagccctgttaccgaacaatttttaatcgttcttgcgatttcctgcacggctaaaaaatcacctcgggatgaagcgggaaatcccgcttcaataatgtccaccccgagtctttcaagctgcttggctatcgccagtttctcccgggaattgaggttgaccccgggagattgttcaccgtcacgaagggtcgtgtcgaaaacattaattttgcgcaacggagaccaccgcttccttctttttgccttgtttgacaaacggcatcatttcacgaagctgtctgccgaccttttcaatctgatgctcgttttcgcttgcattgatcgcattgaaacgaggacggttcacttggttttccacgatccattcttttgcgaatgtaccgttttgaatatccgttaatacttgtttcatcgattcttttaccttcgcatcgactacgcgcggtcctgatacaaagtctccccattgagccgtatcggaaatagagtatctcatgcccgccaatccttcttcatacatcaagtctacgatcagcttcagttcgtgcagacactcgaagtatgcgagttcaggctggtagccggcttctgtcagcgtttcaaaacccgctttgacaagcgccgttaaacctccgcacagaacagcctgctcaccgaacaaatccgtttccgtttcttccttaaatgttgtttcaagaacccccgcacgcgctccgccgattccttttgcataagcaagagccgtatctttcgcttcgcctgatacatcctggtagatggcaaacaatgccggtacgcccgcgccttgttcatatgttcttctgacaaggtgtccaggtcctttaggggcgacaaggaatacatccacatcagcaggaggcacgatctgatggaaatggacgttaaatccgtgtgcgaataccaatgacttgcccgccgtcaattcatctttgatttcagcttcatatactttttgctgctgctcatccggaagaagaaccataatgatatcagcctgggcagccgcttctcttaccgaaaagactttatgaccgtcttcttgggcctgtgtaaatgatttgccttgtctgacgccgacaatgacatcaattccgctttcttttaagttcagcgcgtgtgcatgaccttgtgaaccgtaaccgataatcgctacttttttacctgccaatacgttctctttgatatcaccgttataatatacttttaccattttaatctctcccttttttgtgttatacaattgaaattgttttattggatgacgccttctgctgggttcccctcgcaaaagccgttgtgcccgttctcgcgatttctttaattccgtaaggtttgagaagctctatgagcgcttcgattttattagattcgccggtaacctgaacgacgatgctgtctcttgagacatcaacgacggaagctctgaacggctcaatgattccattgatttccgttctggccgacggtgcggaaacaactttgattaatgccagctcacgctgtacaatcgattggtttgtaatatccgtcactttcaggacgtcaatttgtttgttaagctgctttgtcagctgctctacgtcattttcgccttccacatggacgacaaatgtaatccttgaaacaccgcttgtttccgtgtggcctacagtgatgctttcgatattatagtgtctttttgtaaacaggccggtgatccggtttaatacccccgagcggttgaccaccgttaatgtgataatgcgtttcaaggtttcacccccaccatttcatgaagtcctttacccggcgcgatcatcgggaatactttctcgcttttggcgacccggacgtcaataacggccggttcttttgatgaaagcgcctttttaagctcttcttccgcctcttcttccgatgaaatccgaacgcctttaatgccgtaggcttctgacaatttgacaaagtcaggctgcgccgagaatttggattcagaatagcgttcttcatagaagatttcctgccactgtctgaccatgcccagacattcgttgttcaagataaccactttgacaggaagattcagctgccggatgacatctaattcctgaagggtcatctgaaaaccgccgtctccgaggatggcaacgaccgtggcgttacgatcggccagctgcgctccgatggccgccggaaggccgaagcccattgtgccgagccccccgaggtcacccacttatcagcctttcggaaaggataaaactgagccgcccacatctggtgctggccgacatccgtcgccacaatcgcctcaccgtttgtgaattggtgaatatactcaatcagcttttggggtttcaagccctcttctctgtcgtctgtataccaaagcggatattcttctttccattctgaaagctgctgtttccattcctctgtctgtccctgttttccgttttgcttcaataattcctgaaggacgattttactgtcgccgaccaccggaatctgcgtttcgataatttttccgatttcagcaggatcaatatcgatatgcgctactttggccgattttgcaaaatgcttcagatttccggtcacgcgatcatcgaaccgcgctccgatgctgatcagcaagtcacagtggtaaagcgccatattcgctgtgtatgtgccgtgcatccccgccattcccagaaaaagaggatggtctgccgggaaaccgcccagaccgagaagcgtgtgcgctaccggaatttgctgctgttcggcataattttttaaatcttctgaagctttaccgtgcaaaacacccgctccggctaaaataaccggctttttcgcactgctgacagcttccacgagctttcggatctgcagatagttaggctcttttaccggctgataacccggaagattgatctcgtgatcatatctgaattctccttcaaatgctgcgacatccttcggtatatcaattaataccgggcccggtcttcccgtcgtggcaatatggaacgcctctttaatcacacgggggagatcttccggacggcggacttggtagctgtgtttcgtaatcggcatcgtaattcctaaaatgtcggcttcctggaaagcgtcgctgccgatgaccgaagtggcgacctgaccggtaaacactacgagcggcagtgaatcaatcatcgcatccgcaagaccggtaactaaatttgtcgctccgggtccggaggtagcaatcacaacccccggctttccggagactctcgcatacccttctgccgcatgaatcgcgccttgctcgtggcggggcaggatgtgaaccaatcctgattgatacagtttatcgtaaatcggaaggacggctccccccggatagccgaagatcatctcgacattttctttctttaatgattcaatcagcatcagagccccgttcattgtttttgtacaatcggcagacaaagaatccgcctgtacatttgtgcccattttcagttcctccttttcaatgttcccttctaaaatccaattcataaaacgcagcgccggctgacgcaaataaaaaagccttcccacccacattcagccaagcatttcatgcgatagccaaaaggggcgaaaaggctttgctctccgcggtaccacccttgtttacggtcatatgcagaccgtctcatggataatgattatccgttttgataacgagtaaacattgcgttcactcggccgagtcctactctttacatttcagaccggcactctgaggggagttcactttgatttgttttaccggctctcagcgttaccggctctctgtgaaaaacttcagcaaagctacttatcctcttctgcgctttttattatggcagctcttttattaaaaaagaaccttcatttgtttgttttttcagtgttttatgatttttctttttagtgtgaatcatttatttatttttgtttgaactcatattacgcccgtttgcagacagtgtcaacagcatttttataattattagacaatttagattaatcaatctattttgtatacgctttcattactgatataaaaggatcggcaaatgttaaaagtttttatattttttttattaatctctcaagattacatgaaatttttccgttcatatacgaatatgtcacattttattacgcgatttttctctgtccttccggcatgcttgtcagatattccgttcgattgaacaggctctttatacagacatacgcatacactgttcttatctcgtaagaaatgagtgatgtcatgaataagatgttatcaggcatgcagggcctgcctcctggatttccgcctttaccggtcttaccgccgcagtcttactatcctccggccccgatgcatacagcaccatatcaaggcggcccttcttttcagcagggatttccgccatccggatacggacagcagaccccgcaaagcacactgtcattcgccggacagcaattcgttccgtacccttatacatccgggtactacggccaaaccttcagtgacgtcggcggaagcctcggcgccggggcacatcccggcgcgctcggtggcggtttcagcggccatgccgggggcttcagcgctccgagcggattcagatgatacaaaaaccggtctcacacggccggtttcttttcttattcacagagtataacgttcattccactgattcatttcctgctccgtatagtaatcagcccttgaaacctcaacaatgattaaaccgcattgagtgattaaaaattgtttcagttcctcaaacagctcgtcttttccgcaaaagatcgtttctatattgtgatttttatatgcaaatgcgtacttcaaaagctaattcctcctgctgtctttctatcaatcatcaacaaaacgtatgatagaaatcagataatttatcactcaagggcgccttaagtatctttatacatatatttattacggtaaatattacattaagtttcatttacattaaaattactttacaattttcatcaaatacggaacttttgtttcgtaaaactaaaaataaaatacaaaaaaacctcaaacccattgtcagggcttgaggttttttatacgtcccaggagagattcgaactcccgaccgacggcttagaaggccgttgctctatccggctgagctactgggacatgaaaaacaaatatctgctgattattttaccatgatatcagtgaattgacaatatagtcatccgataaaaaaggccagcggcatcagttttcactctgatgtcaccagctctttttttgtacgtcccaggagagattcgaactcccgaccgacggcttagaaggccgttgctctatccagctgagctactgggacagcttttgctttatgtatcagcgacaagatttattatatacaggttcaaatcataagtcaatattttttaaaaaacttttgatggggaagaatgaaatctcccccatcacttgttaaaaactgattgtattccccaagtccttcaattcccgacccgtttcgtcgtaaaatgtcacggcgccttctctttctgtaagagtaagaatggcatagcttttcacattgcggactctcggaagacggatgctgcccggattaatcaaaagcttgccccgaagcacttcactccccgcaatatgtgaatggccgaagcagacgatatccgccccaagctcttccgcccggtaaaaaacagttaaaagtgactgtttaatgccgtgaagatgcccgtgaacggccagaattttctttgaaccggcatccagaaggagttcatcctgaaacccgccgccaaagtcgcaattgcctttcaccttgtgatacggcgtgagtgccggatgtgcggcgtcaagctctgaatcaccgcaatgaatcatcagatccgcttcgtcttcgtgccgctttgcaatcgtctccagctcgtcttcaaggccgtgactgtcacttattatcagcactttcattgcatacgctcccccttatgaatcaagcagctttgacagtttcttgagcgcctcagccctgtggctgattttgtttttctcagcgcttgtcagctgggccatggttttatctttatcttttacaataaaaatgggatcatagccgaacccgttatctccttcgggtccttctgcaatatacccttcaacatgaccttcgaccgtttttgtttcctgccccggcatgctgacggcaagggcgcagcggaaacgggccgtgcgctgctctttttcgatgccttttaattctgacagcaccttgtccatattcgccttatcatcttttgcttctccggcataacgggctgaataaacgcccggtctgcctccaaggttgtccactgataaaccggagtcgtctgcaatgaccattttgttgacggcttttgccacggcttccgcttttaagatggcgttttcttcaaaggtatgtccggtttcctcaatttcttccgtaaatccgatttccgccaaagaagagacgctgtagcctttcggttcgagtatttccttgaattctttcacttttccctgattgtgtgtcgcaataatgacttctttcacgctgatcaggcctctctttcttatttcagttcaggcaatgtttctcccagcacttctttttgcttttgaataagcgtctggattcctttttcggcaaggcttaacagtccgtttaaatcttcacgggagaatgtggcttcttcgcccgtcccttgaagctctacaaaacgtccgcttcccgtcatgatgatattcatgtcgacttcagccgccgaatcctcttcataattcagatccaaaagaaggccttcttctttatccatcccaacagaaatggccgcgagataatctgtcacgggagaggttttgataacgccgctttttacgagtttgccggtcgcaatggccattgccaagaatgcgccggtaatggaagccgttcttgttccgccgtcagcttgaatgacgtcacagtcgatccagatcgtccgttcgccgagcttctccaaatcaacgacggcccggagcgcgcgcccgatcagccgctgaatttccatcgttctgccggagacctttccttttgaagattctcttatcgttctttgattcgtcgcgcggggaagcatgctgtattccgctgtgatccagccttttcctccgccgcgtaaaaatggcggcacccggtcttccacagatgcattacagatgacctttgtatttcccgctgtaattaaaacagagccttccgggtgagtgataaaatccaaatcaaatgtgatagggcgcagctcatcgtgctgtcttccgtcgtgtctcatattttacctccgattatatgtacataaaccttttgttccggattgtgaataaagaaagaggcagccggaacgctaacctcttttttactagtatatcaaaaatcgcaaattaaaaactacccgtattcacttgtgccggcctcgaaacaggttttgaaagggattctcctttttcattcaccagttctgattttccgtttacttttatagaaacacttttaatcgacggctgttcggttaacgtgagaacgatgctgtccagtacgcccgatgacaccatttttgttttttcgtcggcgcttccgtaaatagagctgttaaagtccagtgtaacctggccgtctttcactttcggcttgctgagaagcttaacatcgttattaaagtccgtcaaaagcccgcttgctttgcccggtccgtcggtgagctgttcaacggcagcggtgatgtcatttgtttccgaattgtcaatccgctttgtaacaggcacgtagtattcgcttgtctctgtttccgccagataatatacagtcagcggatgggtgtctgtcagatcattcactccggccgtttcaatattaatcccgtcttttctgcttaagtcgcccgtaatcggcgtgccgcccacaggcatttctttcagttcgtgcccgttgattctgattttgactttatctattgagctgaattgggtaagcgtccacgtaatcgattgcaggattttttgttcgtcttcttttttatagtttttaaattccttcgaaaaatcagcgactgcagtgccgtcttttttaatatcgacatttaccgtcgtatccgcagggagcaccgctctgaagccgttcggcaggatttctgatacaggccctccctgaaccaagtactcaagggcctgctttgcggttccctcactgttcggaagaggcagtgtctgtgctgcgacatagccgtttttatcaatcagatacagttctcgcatgactgtattggccggctggtcggctttagaagtgccgtttttctctgactgctttggttttgcctgaattcccgcttcatcctttacatatgaaatgtcttgaggcgggtcaatttccccggctgttttatcggattgaaacaaaccgcatccagataacacaaaagccgaagtaagacatgttgcagcaatgactgcaggtccttttttcagcatacttttccctcctaaggctgtttgtactatgatgtatacgagccctgtccgggaaatagaccgggaagcgcaaaaaaacccgctgtaaacagcggggtttttttgatttattttctgaccggctcttgaagggagatgcactcgacatggccgatttcgtggccgaaccagtcttcggcaatttttgcgaagccgttccgctctcccgttgtaagaaattgatgctccggtgcatgtttcgattggtttaacaaacctttataagacaagatggtgctcacttctctcgccgtctcgtctccggaggaaatgattttcacatgctctcccatataattctgaatcgggtcttttaagatcggataatgcgtacatcctaaaatcaaggtgtcaattgatgtaccttttaaaggttcaagcgatgcttcaaccgcttcctccgctgattcctgaagaaaccgtccgctttccacaaacggcacgagcagcggacaagccgtgttctcaacttgaagttctgcgtttaacccgagcagcgcctgctcatacgctctgcttttaatggtattgaccgtgccgatgacgccgatatgctggtttttcgtgacctttatcgccgttctcgcacccggctgaatgacgccgacaaccggaatatccgttttgcgctgaatatcctccaaggcaatggccgtggccgtattacaggcgatcacgagcattttgatatggtggttttccagcaggtaatcggtcatttcccacgtgtattgaagaacttcttcttcaggacgcgggccgtacgggcagcgttttgtatctcccacatagatgatattttccttcggtagctgtctcatgatttccttagcaacggttaacccgccaaccccggaatcaatgactcctatcggctgttccaacaaaatcgcctcattttcttttcatttcatgctgcagtttcaataatgatttttcgaaagcggctgtttcttcttcggaaaatgtcgcaaacatatcccgcaaataagcctgtcttttcaaaatcacttcttggataatgcgctctccttcagcgagaagatgaattctgacgacccgtctgtcagccgggtctttgacccgctcgacaagcttatttttttccatgcggtctatcagatccgtcgtcgtgctgcaagccaaatacattttgcctgataattcgcctattgtcatatcccccaattcataaagccattgaagccccacgaattgcggcggtgtaattgcatattggttaaggatttctcttcctttttgtttaatgatcgcagcgatatggcggagtgatttttcgatatccgcaacatgctctacagattttgatgtcatttgtccatccctcactcaaggatctttctgggctatgcgctccgtgtctattttccttctttttttaagaaaatgcaagactgacggagaaaaaggaaaaaccgggattttcaccgcatgcccatcagcccgggcgccaacgcaaataaccggctccttctcgtaaagaaggaaaaccggcaagaatcagagctctagctcacccattctaagaagctcgacaacagcttgcgaacgccctttcacacctaacttctgcatggcatttgaaatgtgattccgtacagttttttcactgataaatagctcgcttgcaatttcctttgttgtcttgtcttgaacgagcaattcgaatacttctctttctcttttggtcagcagcggctttgattgaaaatctttctccttcaagtattgtaaccctccttgctaaggtgagagcgaatctgaaacgaatgggtttatatagtcaagatatcatatgtaaagggcgcttcggaggtgacgtctcttagagaaatagttatccgttcaggcgagcagaatgcctttctcccgctccgtccagctgaccgctttgccgctttttttcgacacttgaaccataacgacggaacctgtaaagcacggcaggcccgactcattttctccaaggtaatgaagggtgacggacgcatttccggcagcgcttgctttcacataaatccgcagattttcatacggcatcacctgacgcatatagtcgcactgctggcttgcgacgaccgtcatcgtttccgagttttgcgccgtcatgccccgctgtttaaaataagcgatccgtgcttcttcaaaatagatgaaaggggttacattattcatatggccgaacatatccgtttctgaaaaacgaaccgatacttcagtaaagaaagaaaacgactgtctccattcttcaaacgggatatcaatatattgcggttgtttcatcaccttcagctccttataaaaaaacctctcccgtgcggaagaggctctttttctctttcttatactctgtcgcttccgaagaaattacggaatgcttgtaaattggtatctctgttcaaagcagcgattgaagtcgtaagcggaatgcctttcgggcaggattgaacacagttttgtgaattcccgcaatctccgaggccgccgtctgtcattaaagcttctaaacgttctgctttgttcatcgcgcccgtcggatgggcattaaacagacgcacttgtgacatcggggcaggccccatgaatttcgacttgctgttgacgttcgggcaggcttcaaggcagacgccgcatgtcatgcatttagacaattcatatgcccactggcggcgtttttccggcattctcggccccggccccaaatcgtaagttccgtcaatcggcacccatgctttcacttttttcagtgaatcaaacattctgctgcggtcaacctgaaggtcacggacaaccgggaatgttttcatcggcttcagacggatcggctgttccagcttatcaatcagcgccgtacacgactggcgcggtcttccgttgatgaccatggagcaggcgccgcatacttcttcaagacagttcatgtcccatgcgaccggagtggttttctctccttttgcattcacgggatttctgcggatttccatcagggcggaaatcacgttcagattcgggcggtaattgatttcgaattcttcatcgtatggcgcgctttcgggcgtatcctggcgtgtaatgataaaccgtatctttttctcactcatgattatttcgccaccttcttcttcgagtagtcgcgtttacggggcgcaatcagtgatacatcgacatcctgatattcaaattccggagcttcaaacggaccggcatgtttagccatcgtcgttttgagccactcatcgtcatttctttcagggaaatccggtttatagtgcgctccccggctttcatttcggttatatgcgccgagcgtgatgactctggcaagctgaagcatattggagaactggcgggtgaacatcgccccttggttgctccattttgtcgtatcgttgatattgattttcttaaagcgttccatcagctcttggattttgtcatccgttttcaaaagcttgtcgttgtggcggaccaccgtgacgttggccgtcatccattctccgagctcacggtgaagcacgtaggcattttcatcgccgtccatcttcatgatatcggcccatttttcttcttcttttttcacataggaatcaaataatgaagaagacaggtcttccgctgatgtttcaagtccggaaacatatttcaccgcattcggtccggccaccattcctccgtagatggcggaaagcagagagttcgcccctaaacggtttcctccgtgcattgaataatcacattcacccgctgcgaacagtccgcggatgcttgtcatctgatcataatcaacccacagtccgcccatcgaatagtgaacggcagggaaaattttcatcggaagcttgcgcgggtcatcgcccatgaatttttcatagatttcgataatgccgccaagcttaacgtcaagctctttcggatctttgtgcgacagatcgagatacaccatgttttctccgttgatgccgagtttctgattcacgcacacgtcaaagatttcacgtgtcgcaatatcccgcggcacgaggtttccgtaagccggatatttttcctcgaggaagtaccaaggttttccgtctttgtacgtccagactctaccgccctcgccgcgcgccgattcactcatcagacgcagtttatcgtcccccgggattgctgtcgggtgaatttggataaattcgccgtttgcataataagcgccctgctgatagacgattgatgcggcagatcccgtattgatcatgctgtttgttgattttccgaatacgattccgggtcctcccgtcgccataataacggcgtcagaacggaatgactcgatttgcatattggtcagattttgggctacgataccgcggcacgtgcgctcatcgtcaagaacggcgccgaggaattcccagccttcgtattttgtgacgagacccgccacttcatatctgcgcacctgctcgtccagtgcgtaaagaagctgctgacccgtcgtcgctcccgcgtaagcggttctgtgatgctgtgtacccccgaaacggcggaagtccaagagcccttccggcgttctgttaaacataacccccatgcggtccaataagtggataatggacggcgccgcttcacacatcgcttttacaggaggctggtttgccaaaaagtcgcctccgtataccgtgtcatcaaaatgctcaaacggagagtctccttccccttttgtgttgacagctccgtttatcccgccctgcgcgcagaccgagtgagagcgtttgaccggaacgatggaaaacaatttaacggccgtgcctgattccgctgctttaattgtcgccatgaggccggctagacccccgccgactacgataatgcttgattgactcatgatagcccctctccctctagtaatctagttctcttacacaaacgcaaaaatcgcttttaaacctacgtatgaaagcgctaaaaatataatcagcgtcacgtaagtcgaaattctttgagaacgcggcgtaaccgtgatcccccatgtgaccgcaaaagaccataagccgtttgaaaagtggaaaatgaccgataaaacgcctacaatgtaaaaaccgagcataaacggcgagctcagaatattcgccatcatatcgaagttgacttcagcgcccatctgcgcggcaatccgcgtctgccacacatgccagctgacgaaaataagggtgagaataccagtgacacgctgaagcacaaacatccagtttctgaaataactgtagtggccagcgttgtttttcgcagtaaatgctatgtacacaccgtaaaccgcatgataaattaaaggtaagaaaataataaaaatttctaacgcatacctgaacggcagactgtccataaagccggccgccttgttaaacgcatccgctccccttgcggcaaattggttgacgactaaatgctggatcaaaaagatgccgaccggaataacaccgagcaaggaatgcaatcttcgaaaataaaactctctgttcccagacattactttaccccctgtttgatttaagtgcgaaatgtactaaaatctctgcccccacttcgtttcaattgtaagcactttattaaaatttattgacaatttcattttactcctccctcaaaagggcgtcaagaaaacgtgtacataaattataattttcggaattgattatctggagggaaaattttattttcctgcgatatctttctcacattttttcgcgtgttttataggatcatcctgtaatcctcccccctgtttaagctataataaacgaaggagagaggggaatacataatatgaagaataattatgaagcagctttagaacctttaactgaactcgacgtcagcgcatacggctacgaattaatccgggaaatcgtgcttccggatatcctcggtccggatcattcatcgatgatgtattgggcgggaaaacgcctcgcccgcaaatttcctcttcaatcgtgggaagaaatccccgccttttttgaaaaagccggctggggaactttgacaaacgcaggatcgaaaaaacaagaactggaatttgaactggaaggaccgctcgtatccagcaggctcaaacatcagaaagagccttgtttccagcttgaagccggttttatagccgaacagattcaattgatgaacgatcagattgcagaatcttatgaacaggtaaaaaagagagcggataaagtcgtcctgactgtaaaatgggatatgaaggaccctgtataattgaaaaaggcggtgactcaaaagtcccgcctttttgcctgcccgtttatacggcagacggctgtttagacagctcaaacgcatcatgaagcgcttcgaccgctttcaccatatcattttcgctgacaaccgctgatacttttatttcggatgtgcttaccattttgacttgtacatttttttccgccagtacggcaaacatgtccgcggcgacgccgggatttgaaaccatgcccgacccgacaatggagactttcgccagttttctttcggtttcaattttttcatagttaagcgcgtttttatattcttcaagcacggcgaccgtttgggcggcatcttccgttttcactgagaaagaaatatccgcttccccatcatccgactgtgtctgaataatgatgtcaacgttgatgtttcgttttgccagcgcggtgaagattgttgaaagtgttgtcagtccgcttgcaaggcccgtgacggacacccttgtgatctggtcttcaaatgcaattcctctgacgattaaattctgctccattgatgattcctcctcaattaatgttccggcttcatgttccgtgcttgaccgcacttctaaaggcacttggtagtttttcgcgaactcaaccgcccgcgggtgaagaacacccgctccgagatttgcaagttccagcatttcatcataagaaatccccgccagttttctcgctgaccggacataccgcggatctgtcgtaaatacgcccggaacatctgtataaatgtcgcatttatccgcttccagcgctgctgcaagagcgaccgccgtggtatcagaaccgccccgtccgagcgtcgtgatgccgccgtcttccgttacgccctgaaaaccggcaacgactgtaattttgccttctgcaagctgcgaacgaatcgccgtgatatcaatatccgtaattctcgcattgccgtgaacggcttccgtgcggacacccgcctgccagcccgtataagagacggcgtcatatcctttttcctgaagcgccatggccaaaagcgaaatcgtgacctgctcccccgtagacaaaagcatatccatctcgcgtctgcttggttcagatgtgatttcagccgcgaggttaacgagcgcgtcggttgattttcccattgccgaaacgacgactacgacatcatggcctttttgcttttcagcaatggcgcgatttgcggcattttgaattttttcggcagagccgacggaagtgcctccgaatttttgtacgataagacccatactagaccaccctttacattttggttcgtgcgggtgaggagaaaagagcgttttgtccacaataaaaaaagcaatgagaggaatagctctcattgcttttcatatcagtacgattgattatgaacaacgagatagccctccaagaaaatgaattcttgacagccttacatttatttaatgcaaggccagcaaatcacaccgatgggatgtgacacacttcggcgacgctcccctttcagcctttttcgcagaatccatcattctccaaaggcttactattgaagttcgcacctctatcttcaccatataacacgatcttatgaaattagttcacattctagcagatttttcagaaaagcacaatactatttttttaatttttcaaacagcaactgggccgccgcggccggcacaccggcttttttgatatcgtcaaggcttgcttccttcatctttttgacagatccgaaatgttttaagagcatttttttgcgtttttcgccgattccggggatatcatccagaacggattgaaagacgctttttccccggatctgtctgtgaaagctgatcgcaaaacggtgaacttcgtcctgaatgcgctgaagcaggtaaaactcttggctgttccgctccagaaacaccggttcaagcgggtcgccgatcaaaaggttcgatgtccggtgtttatcatctttcgccagtcccgctaccgggacatcaaggccgagctcattctcgagcacgtcgcgcgccgcgttaatctgcccttttccgccgtcaatgatgattaaatccggcagcggaagattttcgcggagcaccctcgtgtatcttcttctgacgacttccctcattgagccgtaatcgtccggccctgttacggttttaattttatatttgcgatattcctttttattcggttttccgtcaataaagacaatcatggccgatacggggtttgtgccttgaatattggagttgtcaaacgcttcaatccgatgcggcgtgtaaatattcagtgcttcgccgagccgttcggctgcaccgattgaccgttcctcatcccgctcgattaacgagaatttttcccgcagggcgattttcgcatttttgtgcgcaagcaaaagcagctcttttttcggaccttttttcggctgatgcacggcggtttccaacagctcgccaatcatgtccctgtcaacgctgtcaggcaccagaatttccttaggcagaaagtgattgtttttggaatagaactggccgatgaaggtcagaaactcttcatccgcttcctgatacatcggaaacatgctgacatcgcgttcgatcagttttccttggcgtataaaaaagacttgaacgcacatccagcctttatcgtaggcatatgcaaacacatcgcggtccagaaggtcattcatggtcattttctgcttctccatcgtcgattcgatgtgagcaagctggtcgcggaattctttagcccgttcaaattcaagcttttcggccgcttctgccattttcgcttcaagctcttttttgatttcgttatgccctccctttaaaaaacgggtgatgtcttcaacaatctcgcggtttgtctcctcagatatatcctttacacatggggcgaggcattggccgagatgataataaagacagacgcggtccggaagctttgagcatttcctgagcgggtaaaggcggtccagcagttttttcgtttcccgcgccgcctgcacattcggatacgggccgaaatagcgtcccttgtcttttttgacattccgggtgacaatcagccgaggatgacgttcatgggtgattttaataaagggataggttttatcatctttcagcatgacattgtatttcggatcgtattttttaatcagattcatttccaaaataagcgcttcaagattggaggaagtcacgatatattcaaagtcctcaatctccgtcaccagccgttgggttttcgcgtcgtgagaaccggtgaaataagaccgcaccctgtttttcaagactttcgctttccccacgtagatgactgttttctgacggtctttcattaaataacagcccggctgatcgggaaggagggccagcttttctttcagttgtttatccatacgttacccttccttacattcatttctcgtgtccattcagtgtatcacgaacatttgtttttctccattctcagcttttggaagatcaaaaaaaggcgacccctttcaaaggaatcgccctgccgtaacggaagctttcggcttacagatgtttgtttacaagctcttcaagagcttctttcggtttgaagccgacagatgtttcaacgacttctccgtcttttagcacgagaagtgtcgggatgctcatgacgccgtatttaccggcagtttcttggttttcatccacgtcgattttgacgattttcagtttgtctcccatttcttgatcaagctcttcaagaacgggcgcgatcattttacaaggtccgcaccaaggagcccagaaatcagccaatacgacaccttcacttgtttcagctgagaacgattgatcagttgcttttacgatagccatttgttattcctccaattgtcaaatgatgatttttagtatagcatctcccattcgttcatgctaatttaatgcttatattattttcccccgaacccgccggaaataatcttatttatacagtgtattataaccgggcggcgggcgttcaaaacttaagatggacctgcaggcagcgtgattaatacaatcgccatcggaggaagctccgcctcaagttttcctcccttttgagcaaacccggaaaacggcttcggtttgacgttttccggactgctgaatgtattgtgggcattcattttttccgcgtgcagaatcgttcccgaaggcgtccctgtctttttcatgccccgcagttcaatcttcacgtcagctttgtgcagatgatcgatattgcaaatgctgatatgtatgtctccgttctgctgtttggacgctgaaatgctgacttgcgggagccggccgtcattccattcgtacccggctgcatttgtttctgccgccaaaagagatgcgtcctggtgcaccttaaacatatcgaacacatgatacgtcggcgtcaacagcatttctttcccttctgtcaggatcattgcctgaagcacgttgacggtttgcgcgatattggccatctgtacgcggtctgcgtgctgatgaaaaatgtgaaaatgcgcggcggcgacaagggcgtcgcggatcgtattctgctgatacagaaagcccggatttgtgcccggctcaggatcaagccacgtgccccattcatcaatgatcagcccgactcttttttcgggatcgtactgatccatgatggcgctgtgccttgtgatcaattcatccatatgcgccgcttttttcatcgtgatgaaccattcatcttccgtaaactccgtcgctgatcctttccccttccagaagtcgcccggtattgtgtaataatgcaggctcagtccgtctatgagatccgcggcttttttcattaaagtttcagtccagcggtaatcgtcgacattcgcgccgccggcaattttatagatttcattaccgctgtaattacggacataggtttggaagtttctgtaaaggccagcataatactcaggatgcatgtttccgccgcagccccagttctcatttcctattccgaaatatttcagcttccacggtttttcccgcccgttttcttttctccagtcggacatcggcgtgcccgcttcaaacgtcatgtattcaatccaatcagccatttctttaaccgttccgctgccgacgttaccggcgatgtacggttcgcatccgagcagttcacaaagcatcataaactcgtgcgtgccgaattcattagaatcaatcgtcccgccccaatgggtattcagcattgttttgcgtttccctacgccgtttgcccaatggtattcatcagcaaaacagccgcccggccatctgaggacgggaatctgaagctgcttgagggcggcggcgacatccgtcctgacccctccggtattcggaatatcggaatcttttccgacccagatgccctcatatatgcctcttcccaggtgttccgcgaaatgtccgtatatgtttttattaatggttccccgtgtgatatcagtttgaatgactgccgtattgtgagacaaacttgatcattccttccccttaataagaatgaaagcactacagccgatctatctgggatgtatgctgtatggataagtttgtaagcgctttacaaaagcttattacattggttcgtacatgtcaatctgttgttttattaatctataatttgtacgaactaattaacacaaaccaaaaccctctgacaaataagccagagggttttgattatgaatgaatattggcatttttaaattcctgagtcagaagcggaaccacttcgaacaaatcgccgacaattccgtagtccgctattttaaatatttccgcttccgggtctttgttaatggcaacgatgaccttactgtttgacatgcccgccaaatgctgaatcgctccggaaattccgcaggcgatatacaaatccggcgtgacgacttttcccgtctggccgatttgaagagaatagtcgcagtagtccgcgtcacatgcgccgcgcgaagcgcccaccgctgctccgagcacctcggcaagttcttttaacggttcaaatccatctttgctttttacaccgcggccgcctgctacgataattttcgcttctgataaatccacgccgtccgccgtttttttgactacttcttcaatgaccgtccgcaaatctgccggaggcgccgcaagctcttcaatatcacccgtccggttcgcgtctttttctaatgcctgaatattattcggacgaattgtcgccagaatgaaaggatcggttgaaatcacctgttcaaaggctttgccggaatagatcggtcttgtaaaaacgatgttatctccggtaacgcttacatctgtgctgtctgaaatcagccccgtttcaaaccgggccgcaagcttaggtgacaaatcttttcccatagaagtgtggccgaaaatgaccgcatcaggcttttcattttcgatcaaatccccgagaattgcggcatatccgtccgccgtatactgagaaagccccggcgaatcggccgtaaatactttgtcggcgccgtactgaatgagttctgatgctgcatcagccgcgccctttcccatcagcacgccgatgacatctcctccgccggaaatggttttgcctgcggctatggcttcaaaggtgacgttccgtaaggcgccgtcacgaatttctccgagtacgatcactttttttcccattctgacatcccccagtttctttaatatcagtttatacgactttggcttcttttctcagcagtgatacaagctccttcgcctgctcagaggcttctccttcgatcagtctgcccgcttctttttgcggcggcagaaaacgttcgatcgttttgagcttcggtgcggcatcatcttcatcaatgccgagatcatcgagctcaagttcttccagcggttttttcttcgccttcataatgcccggaagcgacggatagcgcggctcgtttaagccttgctgtgccgtgatgactaaaggaagtgaggttttaatgatttcggtatccccttcgttgtctttctctgccgcagcttcatcgccgctgattgtcagttttgtaatcgttgtgacgcaaggaatgttcagcagttcggcaagccttggagccacttggccggaaccgccgtcaatcgcgacatttccgccgagaatcagatcatattcccggtccttgaaataatgatataagatagttgaaacggagtattggtcaggatcgctcagatcatcttcaatattgattaacaccgcctggtcacagcccatcgcaagggcggttctcagttctttctccgcatcttctccgccgacggttacggcggtcacggttccgccgtgctcttccttcagctgaatggcttcttcaatggcgtattcatcatacggattaatgataaattcggccccgtcctcctgaatctttcctgcttcaatgacgattttctcttctgtgtcaaacgtccgtttcatcagtacaaatagattcatattcttatcccctttatcttcgcccaccgaattgaggctttcttttttcgagaaatgcctgaatgccttcttttgcgtcatctgatgcaaatgcttccccaaagcgctttgcttcaagctttaagccgccgtcataagaatagaccttgtttgaataaaggagctcaagcagaaaagccatcgactgcgggcttttttccgcaaacttgcccgcgagcgttttcgctttttgcagcagctcttcctcatgttcggcgcctatcgtgacaagaccgaggctgagcgcttcttctccggttacaggttctgaagtgccgatcatttcaagcgctttcgccgtaccgacgtaccggggaagccgctgcgtcccggcaaagcccggaataatgccgagattcagctcgggcaggccgagctttgcatctaatgtagcgattctgatatggcaggccatggcaagctcaaggccgccgccgagcgcagcgccgtgaatcgctgcgataacgggcttcggaaacccttcaattctttccatcagctgctggcctttatccgccatggcagaagattgctcaagattttcaagcgacgtaaattcctttatatcagcgcccgccgagaaaaatttcccctctccgcgaatgatgatgcttctgacactgtcatctgtttcacagcggtcgaacagaccggacaactcatctaaaaccgcgccggacagcgcgtttgccggctgatgattaatggtgatcaccgcaacagattgttctaccgccatcgaaaggctgttcatccgtcaaccccctttagttttgatgaatccctgacaccaacagctccaataccttgtctgacaaatccggaagatcatatttctgatcgttcatcacccatgttgtcactgtttcatctatcgtcccgaatatcatctgccgggcgaggcggacgtcgagattatctttccattcgcccgactcgattccttcggtcaaaatggtgtccagcatgtttaaataaccttttaaaatatcattgattttcagacgcagcttgatattcgactgtctgagctcaagctgggtcacaatcgcgaggtggcggtcattgccgagcagtgtgaaatgctgcttaataacgagagcgagtttttcttttgccgtcgttttttctttcacttcttcttccatgcgttcaatgaactggcccatcttttctttaaaaagagaaatgagtatatcctctttgtttttgaaatataaatagatggtgccgtccgcaacgccggcctgcttggcgattttggacacctgtgattggtgatagccgttttccgctatgacttctactgctgcatcaataatctgcatatactttggccgtttttggttcaatgtcatcgttccttccttcgataaatgaatgactattcattcataacttcatgataaaaaggaatccggattttgtcaagtttttcttttaaggcaccttgttttcatgggaagcatcttcctcttcgactaaacgccttcttaatatttttccgacggccgttttcggaagctcttttctgaattcgtacagcttcgggactttgtacggcgcaagccgctctcttgcaaacgcatcaagctcatcggcatctgcctcggcgccttttttcaaaacgataaatgctttcaccgtttcccctctgtaggaatcagggacgcccgctaccacgatttcctgaacggcttcatgctcataaagcgcctcctccacctcgcgggggtaaatgttgtatccgccggcaatgatgatgtcttttttcctgtcggcgatgtagaaaaatccttcctcatccatatatcccatatctccggtaaacagccagccgtctctgatgacacgcgccgtctcctcctgcttattccaatagcctttcatgacctgagggccttttacgatcagctcgccgtgttcatacggctccgcaagcccgcctttttcttctgaatagattcccgcatcggtattgggccagggacagccgatgctgccgggtttattttttccccagatgaagtttgaatgggtaaccggtgatgcttcggataatccgtagccttccacaagctttcctccggtcactttttcaaatttctgtttgacctcaaccggcagtgccgctgaaccgctcggacagctttcaatggaggacagatcatacttattcagctccgggtgatgcagcagcccgatgtaaatcgtcggcgccccggggaaaaccgtcggcttcaacctgtcgattgttttcagtgtatccaaaggattgaatttaggaagaaggatcatttcacatccctgcataatggaaaaattgagcacggcggtcaatccgtacacatgaaaaaaaggcacgatgccgagcaccttttcggctccctttttcattttgtacatccaggcggcgcacatttctgtattggcctgaatgtttcggtgtgtgagcatgacgcctttcggatagccggttgttccgcccgtgtattgaagcacggcgatgtcatgcgcagggtcaatatcaaatggctctgcttcctctgctttttcgttttttaaaatatccgctaatttgtgaatttgttcgcagccgtcataatcaatatgcacctgttgcttttgcgtgagcgtataaagcatatttttcggaaacggcaaaaagtcttttatacttgttgtaataatgcgttcgacgagtgataacgttttcatttttatcactttcggaaacagcatatcgagggtgatgatcacgcgcggcgcactgtctttcagctgatactcaagctcgtgttccgtgtagagaggattggtctgaacgacaatgccgccggcaaacaatacgccgtaaaaagcgatgaccgactgcggacaattgggcagcataatggcggctctgtcaccttttttcaggcctgttttgcgtaaaaaagcggcaagctttaatgaatctgtgagaacgtcttggaatgtgagtttttttcctagaaaataaatggcggtatggttcgggaattgagctgcggagtttgtcagattggatggcagggtttgatcggtaaattcaagctcatgcggaatctcttcgggatattgagaaagccatggcttttcagactgcataatacctctcccttctgttttcctatacgctattattatagcagaagggtgattggaatgggaaagcgtttcatgggaaatttcgagtttcaggaggtgttgagttttctggaaacgctgcattttgaagggggagttcctatcctgcgccagctgccgaagccgattacgtcggccgcctttttgctccatccctttgtccggatgccagatggtcgggaagagcaaaagcgcaaacggccttatgaacatatgtatccgagtgatgaggagatcatcgcgatgggcagacccgtttcctggcaaaccgtcatgagcatttgcggcctgcgttctgaaaaagaaacggcgcttgcgcttatgactgctgtcacggcattgcgggaggaatatgcacatcctgaatccgccgagcggttaaatcggctccatcatcccgatctgtacttgccgagcgatgatgtcacttcgccatttttgattccgggacttttggatgtgttccgttcaaaaggcataaagcgctgcacttattatgagcctgtcgaagagaaaggcctattttcactcaatcaaacggcggcttcggatgtatgcggactgctgcgggctgacatgatcattgccgatgaaaaaacggcgcgccgcttttatgagcatatatgattcttttacgacactctttctcatggaagaacaagacattcagtctgtcgtccgcgccatgaattgggaagccgtcatttgctctgatacggcctgcataaactggtattctcaataaaaaaggccgccgatttgagttcggcagccttttttcagtattaagatgtcatgaccagataaataagtccgatgaacagaaaaatccccgctgccgacagcagcactttcgcaagcttctccatttttccccgtccccttaaatcccggcggccaccacaaatgacaggccgactgagatgacaaatgaaataaagccgacagctctgttatctttttcaatttctttatcaattttaaaccggggcgtcagaaattcaaagataaaatagctgattaaaagcataataaatccgtatacgccccagccgatcatttgcaaaagcgaattatgctgggcgatgctgtgctgaaagacatttgcgataccgagaattttccctccggtcgccattgccaccgcaagattgcctttttggatttccacccagtttttataggatgtcaccaattcaaacacggtcagaaaaatgacgagacacaagacggcaacactgtaataagccgcgatttcaacaagctcattttcccaaaaagcattcatgacgttttctccctttttattttagttcgacaatcgttacgcctgatcctccttctcccgcttccccgaaccgcgagcttttcacgctgcggtggtttttcagaagatcctgcaccccttttcggagggcgcccgtgccttttccgtgaatgatggacactctcggatagccggcgagcaccgcgtcatctaaatatttttcgacgcggctgagggcgttttcgtaacgctctcccctgaggtcaagttcaagggatacgtgataatccttcccttttacggcggtgattgctttttcttttttcggttcaggagccgatttgagaaactcaagatctttttccttcaccttcattttaaggatgccgatttggacgttccattctttctcgccggttttttcaagcagcgcccctttttgtccgaatgtgagcacctttacttcgtcgcccggcttcagctcgcgttttttctctgtttttctttccggctgctttgatttttcaaaagccggcatcgcgtctccgagacgttttttggcgtcaatcagctcgtgttccttaaaggatctgtgttcttgcttgatggacctgagctcgcggataatctgttcggcttcatttgcggcggcttccagtttttccgcagctttccgctcggcttcttccatcattttatctttttgggcattcagctcaatgatttgctgctgaagctctttgtgcagtttttctgcttcttttctgagtgattcggtttcagaaagttcttcatccgctctttttttgcttttttcaagcgatgcgatcatcagatcgacttcgttatgttcggcggtcatttctgacttcgcctggccgatgatatgctccggaagcccaaggcgtcttgagatttcaaatgcgttgcttcggcccggcactccgatcagaagtttataggtaggcgaaagcgtttcaatgtcaaattcaacgctggcattcatgacgccttgtctgttatatccgtatgctttcagttccggataatgggttgtcgcaagcactctggcgtttgtccggtgaacttcgtcaaggatgctcatggcaagcgccgccccttcctgcggatctgttccggcaccgagttcgtcaaacagcacaagactgttttcagacacgtcttttaaaatattgacgatattgaccatgtgagatgagaacgtactcagactttgttcgatcgactgttcatcgccgatatcggcaaacacattgtcaaatacggctgcttccgagccctcgtcagccggtatgtgcaatcctgcctgcgccattatcgtcagcagcccgagtgtttttaacgtaacggttttaccgcccgtattcggtcccgtgatgacgatcgttgaataatctccgcccagttcaatatcgttggccacgacttgatcttggggcagcagcggatggcgcgcttttttcagacggataaagccgtctccgttcatgaatggttttgtcgccttcattgcttttgcgtatctcgccttggcgaaaatgaaatccagtgtctgcagcacttccacattttgagcgatttcttgtgtgtgttcagccgtatgctccgtcagcatccggagaatccgttcgatttcctgtttttcttttactttcgcctgctgaagcgagttgttcatatctacgatcgcctgcggttcaataaacagtgtagcaccggatgaagatgtatcgtggacaattccgccgtagcttgatctgtattcctgtttgaccgggatgacaaagcggtcattccgaatcgtaacgatggtgtcagacagcattttagaagcggaagatgaacgcagcatcgattcaagccggtctctgactcttgattcaagcgtcctgagctgcgtgcggattccccttaaagcgggagacgcatgatcaagcacttcaccatggtcatcaatgcaggagttaatctccctttccaaatcgcctaatgtaatcagctcttctgcatgggcctgtatcagcggtatgccgacgccgtcttctgtcatttggctgataaaatgcttcatttgtttaacggcatacagcagcccggacaattcggtgaattccgccggcgtcagcacactgccgatttccgcccgccgtaaagcggatcttatgtcggtcaggccgccgaacggagcatggcctcgcaagcgcatgaccgcggatgcttcttcgacttcatccagctgtttttggatgtcggcgagatccgtcaaaggtttcagctgcagaagcttctccctgccgagcgatgaggcggcatgtgcggtaatctgttcttttactttatgaaattcaagtgatgataacactttttgctgcacggttttatggtcctccttacttaatcattgcgcgtcagaaatgctttgacctcatgtaacggccgggcgtttaacacatgttttgtctctgtccagcctttgcgcgcagcggtcacgcccgttttcatatcatcgagcatctcgatattatgggcatcggtattaatgaccaaagtcacacctttttcatttgctttgatcagatgctcagtccgtaaatcgaggcgcgcggggtttgcattcagttcaagcgccgtatttgttttggctgcgagctcaatcagcatgtcgatgtcgacttcatagccggcccgtctgccgatcaggcgtcccgtcgggtgggcgataatgtccacgtgcttattcgtcagcgcctgttcaagccgtttcataatgacatgctccggctggctgaagcttgaatgaatagatgcgatgacaagatccatttcagacagaacgctgtcatcataatcaagcgaaccgtcggggagaatgtccatttctacgcctttaaaaatatgaaaattttcaaattcagcgtttaacgcgtcaatttcttccgcctgttttctgagccgttcggccgttaacccgttggctacctttaaatattgggaatggtcggtgatcgccatgtactggtagccttttgccatacacgcttctgccatttctctgatggaaaaagcgccgtcactccaggctgagtgcatgtggagatcgccttttatcgctttatgctccacaaggtccgtttcttcccggtacgtgtcgacctcctgcccgctttctctgagctcaggaggaataaacggcagaccgaagtgggcgtaaaacgcttcttcgctcgggaatgttttgacgtctcccgtttctatggtttctactccgtattcactgatccgttcaccgcgctctttcgccagctgacgcattttaatgttgtgatctttagaaccggtaaaatgatgcagtgtggtggcaaactgttcctctgtcacaagccggaaatccacactcgtctcgtattcaaaggtcaggataaccgatacttttgtatccccgcccgctatcacgtcttttacgttcgggagggaaagaagctgttctctgacagcctccggacgatctgtagcgataatgtaatccagatcttttacggtttcccgcgctcttctgagactgccggcccgggaatatttctgaatatccgtcagccgggccaaatgttcttcaatgactgaagcaatgctgagcgcatagccgatcggaaaccgttccggctgttttccggcttctccgagagcctgaaggattttctcctccgtttttttgccgaaaccggcgagcccctgtactttttgctgctcgcatgcttctttcagcgattccgcgtcatgaacgccaagctcctggtacagcttggcgatttttttgccgccgaggcccggaagcttcaaaagaggaaccaagccttccgggacttctttctgcaattggagaagcgtgccggacacaccttcctgcatatattcacgaatgacgccgtaggtgccttttccgattccggataaagacatcatgtcgtcgatttccgacaggctgcggtcatcctgctcaagcgccgccgccgcttttcggaaggctgatattttaaacgggttgtcccctttcagttccatatagaccgcaatcgtttcaagcagcctgatgatatcttttttatgcatactgttaacccccagtcgtttcctgcttttcatcatacaaatttttctcttccggcacaactgacgcagagcttgaaaaaaacttctccggtcaagagaagttttttatgccccgtactgggcccacagttcttgcaggagccccgacagatacggcgtatgatgtgtgatgatatttgcaagcgtcgattgtgcgagcatatcctgaagcacgcttaccggcagtacggatgcgacgtataacaggataaacgcaaataaatagacttccagaaatccaagcaccccgcccagcagtttgttgatctgtttaatgaccggaatgccggcgatgatattaagcgccgctccgataatccggagcaggatctttgcgatgataaacaaaatgacaaacgcgatcgcgttgtaataagccgtctccacgtttcctttaataaaagacagagccgcctgcccgccggaaaaatcaggggcgggtataaagctcagatgcggggccaggtttttgtaaaaaagcgccgcaaacgcaatcgagaggatgaaactcgtcaagtatataaattggaggataaatcctctttttaatccaagcaatgtgcccattaagagcagaactaagatgatgatatctatcatatggtgttcattccttttctttaagctgccgctccagtatttcatatttttcttgcagtttcatataatcatgcacgacattgaccgcagtcaatacagcgagcttatttatatcaagatatggatttttctcgttgatttctctcattttatcatcaaccattccggccacatggcgcatgtgcgctttgctttcttccccgataatggtgaagtgctggccgtaaatgtttactgtcgttttggtttttttgccgtcagacaacgtttctcctccattccgcgagaatcctagttcctatcataccacgattatcgtttgaatggaaagacaagcctcgggctgttatgatacactggtatatacagtgaaaagtgccaaaaaaggagattatatcgtgtcccattctgttataaaagtatccgcttccgctatggaacaaatgaaacaatcctatgccggctcccttactcccgccgttccgcagggcgccgtcttccaggccaagcccccgggctgtaccattacagcctaccgctcgggcaaggttctctttcagggaaaaaacgccggcacagaagcggcccgctggggaacggctgaggcgccgaaggcaaagaaaaccgtcaaaaaagcggccgatccgctttacgctcccccggcgggcattgcctccatgtcagtgatcggctctgatgaagtcggaacaggcgattacttcgggccgataacggttgcctgcgcttacgccgacaaaacaaagctttctttaatgaaagaactcggtgtgaaggattcgaaggatttaaaagatccgcagattattgaaatcgccaaactgttaattaaaaccattccttacagcctgcttgtgttgaaaaacgaaaaatacaatcagatgcaggaaaaaggcatgagccaaggaaaaatgaaggcgctccttcataatcaggcgatttccaatctgctgagaaaaatgaacggcgttaaaccggaagcgattctgattgaccaatttgcagagcccggcatttattttaagcatctttccggacgggatatcgtaaaagaaaaaacgtttttcagcacgaaagcggaaagcatacatctttccgtcgccgcagcctctatcattgcgcgatattctttcttaattgaaatggataagctttcccgtgaggctgggatgacgattccaaaaggcgcggggccgcacgtcgatgaagctgccgccaagctgatcatcaataagggagaaggtgcgctcagaacgttcaccaaacttcattttgccaatacgcaaaaagcgaaacgccttgtagaacggaaacggtcataataaaaaaagcttgcagaatgatctgcaagctttttctttatcctcttaataccgcctgatacgtttcttccagcgctttcagcacgttttcatgtacttttgtcacttcttcttctgtcaatgtttgttcagggttaacatattggagcgagaaggcgacggattttttgccctcttccatatgctcaccttcgtacacatcaaatacggtgacttctttcagcagcgcgccgccggcttctttgatcacggcttcgagctgtccgcttgtaacggttttatctgccacaagcgcaatgtcgcgcgtgacggacgggtacttcggaatcggcgtatacacgacaggttctgtttcctcggtcagaagcgcgtgcagatcaagctcgaacacatacgtttctttgatatccagctctttttccattgccggatgcacctggccgataaatccggcaagcgaaccgttcaatagaatgtttgccgtccggccgggatgcatgtttttgcgtgcagactggacaaattcaacccgatctgacacattcaattgatgcagcaggccttcaacgattcctttggcgacgaagaaatcaaccggctttttctcaccctgccataaatttttgcgccacaatccggttacagctccggcaacccgttctttttcaaccggttttgtgttttcttctttcgtcagaaatacagaacccgtttcatataaagcaacggaatcagtctgtctggccagattgtatgaaacggcttcaagaagattcggcacgagactgtgtctgagaatgcttctttcttcgctcatcggcagagcaagcatcgtgttgaatgatttttcgatcgcaaaagcggccgcttttttatcattcgttaatgaataagtggtcgcttgtgaaagacccgctccttcaaggaaacgtctcactttccggcgttttgcctgatacggtgtcaagccgcctgtcgtgccggccgtttccggaagcgtggacggaatattgtcatacccgtacaatctcgccgcttcttcaatcaggtcttcttctattctaatatctccgcggcgggacggcactgttacgacgagaacgtcttcagcttcactgactgcaaacccgaggcgcttgtaaatgctgatgatttcttctttagcgattgccatgccaagcacggcgttcactttttcaacagacacgtgaatgttgtttgcttcgattttcagatggttttcttcaaccgtgcctgagagcacttctccgccggcatatgcctgaatgagactgcaggcccgttcagccgccagcaaaacgcgggccggatcaatgcctttttcatatctggcgctcgcttcgcttctcagtccgaggtctctcgacgctttgcggacggtctgtccgtcgaaataagcggcttccagtaaaatcgcagtggtgtcttcacggacttcagactcggctccgcccatgactcccgcaacggcttgcgctttttttccgtttgtgatgaccaaatggctgcttgacagcttgcgctcttgttcatccagcgtcacgatggtttcgttttccgccgcttttctgacgacgacctcttttgaaccgaaccggtcgtaatcgaaagcgtgaagcggctgtccgtactcaaggaggacgaagtttgtaatgtccacgacgttattatgcgggcggatgcctgcattcatcagcttcgtctgcatccaaagcggtgacgggccgattttgacgtttttaatgatttttgcggcataatgcggattggcctgcgtatcttcaatcttgacggaaacagcatccgccgctttttctgccgctttttcatatgaagcctccggaagctttacctctgcgccgaggatagccgccacttcataagccacgccaagcatgttcatcgcgtcggcgcggttcggcgttaagccgaattctaaaatcgcatcatcaagctgaagggccgccattgcgtcagctcccgtttcagcatcattcggaaaaacgaaaatgccttccgcatattctttcgccacgagcttgctttcaatgccgagctcctgaagggaacagatcatgccgtgagacgcttcgccgcgcagcttggcttttttaattttgaaattgccgggaagcacggctccgaccgttgcaacggcaaccttctgtcctttatcaacattcggggcgccgcagataatctgcacgggttcctccgcaccgatatcaacaaggcatttgttgagtttgtcggcattcggatgctgttcacgctcaagcacgtgtccgatgacaacgccttttacgccctcccctttatactcgataccctcaacttcaataccggctctcgtaattttttctgcaagcacggccgggtcgattccctgcaagtcaacgtaatcttctaaccatttatatgaaacaaacatgtgtatcctcctcttacgcctgtttaaactgcgaaatgaatctgacatcattggtatagaaatggcggatatcttcaatgccgtatttcagcatcgcgatacgttccacacccattccgaaagcaaaaccctggtattcctcaggattgaatccggccatcttcagcacgttcgggtgaaccatgccggcgccgagaatttcgatccagcctgtttttttgcagacggagcagccttgtccgccgcacttaaagcaggtcacatccacctcgacagaaggctctgtgaacgggaaaaagctcggacggagcctgatttcacggtcttggccgaacatttttttggcgaccaattcaagcgtgcctttcaggtcgctcatgctgattttgcggtccacgacgagaccctcgatctgcatgaactgatgggaatgtgtcgcgtcatcgttgtcgcggcgatacactttaccgggacaaatgattttgacggggccttttcctttatgcttttccatcgttcgcgtctgcaccggtgacgtctgcgttctcatcagcatttcttctgtaatgtaaaagctgtcctgcatgtcgcgggccggatgttccttcggcaggttcagcgcctcaaagttgtaataatccgtttccacttcagggccttcttcgacggtatatcccatgccgataaataaatcttcaatttcttcaataacgaccgtcagcggatggcgtcccccgatgtttacctgactgcccggcaacgtgacgtcaatcgtctggctgctgagttttttattcatctcttcttgttcaagctgttcatttttcgccgtaatggctgctgcaatgcgctctctcacttcattggcgagcgctcccattttcgggcgctcttcggcggacagtttgcccatgccgcggagaacttctgtaatcggccctttttttccgagatattgcacccgaatgtcgttaacttcttttaatgaacccgccgcttctactttttctgcagcttccagttcgagctgtttaagcttctcttccatcatgcatcctccttttatgtaaaccaaaccgttctatgcctttttcagaaaacaaaaaaacccgccccttgagagaagggacgagttgtggccgcggtaccaccctttttaaggcagacttcatctgccgacagcttcattgacataacggaaacgatcgttccggttcacctttacgcgcgtttggcgcggtcccggtgacaactcgagaggtgaaaatcaatttctgtgctgcgataaaaatgctctcagtcagcggcattttctccctggaaggcagcgtgtgcaaaaattgacgtcctctgtcacggtttttacattattgctatctattatagtgaaatccaaggtttttcgcaacctatcctctgagatgataaacgaggatggcggccgctaccgccacattcagcgattccgcctgtccgtacagcggaacgtacagattgagatcggttttttgcagaaggccggcgtccactcccgccccctcgttcccgacgattaacgcgaacgattcttcaggcttcacgctttgataagccgcaccgttttcaagcgccgtgccgtagatcgcgacgccttgtgatttcagctcggcggtaaactcatcaagcggacgttttaaaatgggaatatgaaaatgagatccttgcgctgaacgcagcgtttttccgttgtacgggtctgccgttccctcaccaaggacaacggcgtcgattcccgccgcatctgccgttctgatcattgttcctaaattccccgggtcctgtacggcatcaatcagaagcagccgcttcagctgatcaggccgcttatccggcatatggcagaccgcggcgatccgctgcggcgtttccgtttccgtcacggctgaaaacgcgtcttcgctcagcacgtagcacggaatgctcatatccagatcggccggaatggcgctctcatcgtttacgagaatttcttttaccgttccctttgatttgagcgcttcttctgccagatgctctccttctatcagaaatgtattcgttttaagtctctctttttttgtgtgaagttttttccagtccttcactttttggttttttgcagagtcgattcgtttcactttatgtctgtgctctccttttttcatgcatgttgttattatatctcaagaacagcacataataaaccgcgtgcgcggtaagaatatgcgtatcacattcaggaaaaaggagcggttgtaatggatcttaatttacgcaacgccgttattgccaatgtaaccggcaataaccaggatcagctggagcatactatcgttgacgccatccaaagcggtgaagaaaaaatgcttccgggcctcggcgtcttattcgaagttctttggcagcatgcgtcagactcagaaaaaaatgaaatgctcaaaacacttgaaggcggattaaaacctgcgcaataagcatgaaccgggtgatggcacacccggttttttttgtataataatggcgagggggatcgccatgcagttacagccggaactggcaaagaaattgattgccgaagtcaaacatatgtacagccgcgaagtgattattgccgatacaaaagggatgatcatcgcgggcaccaatgaggcgcgcgccggatggtttcatgaaggcgcactgatctgcgcccgcgaaaaacggaatgtcatcattacgaaagaagatgaaaaacgcctccagggcgtaaaagcaggactgaacctccccgttttttcaggccatgaggtaatcggagtgttcggtctgacaggagaccctgacgatatcctgcctttcggagaattgctcaggaaaatgacggagctgtttattaaagaaacgcgccatatggaagaagcgcagtggcgtgcgagaatgcttgaatcctttatggttgattggctgcagctgaaagaatggtctccgggctttttagaaaaagcaaagctcatcggcgcagaccttcacgcataccgccggatcatactcattcaaggacgttatgagcaatataaagcggaggagctcgggcggctctggcagaacgaatgccctgaagacctgtttgtccgctggggaaatgaacgcattctcattaaccatgaagcaaattcggcttccaaaacacagctcatcaaaaagatcggcgccgtttttgggcagcctgtcaccgccggcatcggacggatcgttccgggagagcgcctcgcggaatcatacgaacaggcggataaagcactttcagccggaatcggtgacaagcaggccgtctttgaagaagatttaaaactggatatgtgtattgccgatatcgcgcccggcacgaggtcggaattttcacggcgggttctcgagcatgtactcggccgggaagaacttctggatacgctgcgcgcctttttcgaccggcaattatcgttaaagcgcaccgcagacgacatgcatattcatatcaatacattgcgctaccgtctttccaaactggaatcactgacaaatatgaagcttgaccgccccgaagacataacggctttttatttggcgctccgctttttagatcaacatacaaaaagcacgtaatcatatcatcatttttcatatgtttctccatagtgtgaagaatcgtttttctttacaattaaatgaaaacgcttttcttatcagggaggttggagaacatgatttcacgagaggcaaaagaagcgttcatccggacggtcgggaaggagaattatgatgattcggcggctggccgtcttgtgtattcttacgatgcggctcctcagctgcaagccatgccggatgcggtaatcgctccccgcagcgcggatgacgtgtcccgtatattaacgatttgcagcaggcatgacattccgatcgtgccgaggggttcaggcacaaacttatgcggcggcacatgtccgtctgaaggcgggcttgtgcttttattcaaacatatgaaccgcattcttgaaatcgatgaagaaaatttgacggcaaccgtccagccgggcgtgatcacgcaagatatgattcatgcggttgaaaggaaagggttattttatccgcctgatccgagcagcatgaaaatatcgacgatcggcgggaatattaatgaaaattccggcgggctgcgcggtttgaagtacggcgtcacccgggattatgtcctcggccttgaagccgtcttggcttcaggcgatatcatccgcacaggagggaagctgacaaaggatgtcgccggttatgatctgacccggcttttcgtcggatcagaaggtacgctcggcgttgtgacggaagcgactttaaagctggttccgaagccggaaacgaaaaaaacgctgcttgcactctatgaacatattgaagcggctgcggaatctgtttctgccatcatcgctgaaaaaatcattccggcgacactcgaatttctggatcagccgacactgcaggtcattgaagattacgccaagatcgggcttccgaccgatgcaaaagcggtgctgctgatcgaacaggacggtgacatcgaaacggtcagacgagatatggaaaaaatcgaagccatctgtaaaaacggagcagccgtatccgtccaaacggccgaaaccgaggaagaggcattcgcgcttacagaggccagacggtccgcattatcagcccttgcccggctgaaaccgacgacgattctggaagacgcgaccgtgccgagatcacaaattgccggcatggtcaaagccattaacgagattgcagaaacatacggcctgtccatctgcacattcggccatgccggagacggcaacctccatccgacgtgcaccaccgatatccgaaatacagaggagatggaacgtgtcgaaaaagcttttgccgccatttttgaaaaagcgattgagctgggcgggacgataacgggtgaacacggggtcggcatcgtaaaagcgccgtatttagaaatgaagctgaaaacagaaggcattaccgccatgaaagcgatcaaacaagcgcttgatccccaaaatctgctgaatccgggaaaaatattcgccaattcatcaaggaaacgcgtggtgatgatgaaatgacaacggctaaagagcagcaacacattcaaacagaattcaaaaaccgcatggatgaaggtgaattgctgaactgtatgcgctgcggcttctgccttccttcctgtccgacctatatcgaatcaggatttcaagaatcccattcgccgcgcggccggatcgccctgatgaaagccgtcacagacggactgatcgaaccggatgaagatgtcgagcgctcactttcgctgtgtctcggatgccgggcatgcgagcccgtttgtccggcaggggtcaattacggacagctgcttgaagaagcgagggatatcattcatcaaaataaaaaacataagcccggcgtgcgcctcttgcggaaagccgccttcaccgggcttttccctcatcaaaaccgcatgcaggcagccgtgaatcttctcggaatataccaaagatcgggactgcagaccgccatcagaaaaaccggtatgctgcgcgttttgcctgaacatctgcgcacaatggaacaagtgctcccgcccgccccgaaacggaaagacatgaaggaaaggccgcgttttcttcctgccgcgggtcccgtccaaaaacgggccgcttttttctcgggctgcttaatggatacgatgtttttagcaacaaatcatgcgacaacggcgcttttacaggcggccgggtgtgaaatcgcggttccggacggccaggcgtgctgcggcgcgcttcacgggcacagcggagaaaaagagatgggaaaagaactggccaagcggaatatcgccgcttttgaggcgcttgacgctgattatatcattacaaacgccggcggatgcggcgcctttcttcaggaatatccgcatttactgaaagatgaacctggatgggcggaacgtgccgaacaattcgtccggaagctcaaagacttttcatccgtactggttgatctgaagttccatcaaaaaaacctgcgggcgcagtctcctcatatcgtcacatatcaggactcctgccatctccgcaatgtgatgcatacgtcagaagaaccgcgcacgcttttgaaaaacattaaaggggctgagtacagagaaatggaaaaggccgacagctgctgcgggtcggcgggaatttataatataacagagtcagaaatgtctatgaaaatattagacagcaagatgaaagccgccggaaaaacggaggcggccgtcatcgtgacagccaatcccggatgccttctgcaaatgcagctcggcattttacgcgaaggattaacaggccgtgtccgcgcggttcatttggcggattaccttttggaagcggcggatttgtcataagccgaaagcagagagaccgatcggctctctgcctttatgatgctacaatgttcggatcggccgcggatttatccgggtattgaagcttccagtctggcactcggatcacgccatacattcgcccattttttcacagccgcaatgataatcacaagcccgagaatcagcatgataatggataaaacgccattcagcacgttgtatcccgccgcttcggggttcaaatacacataccgcaccatccaataacccgcatagttgacggtcacgtacaaataagcgagaggaatcaggcatgtcagcatatagcgccgcttatccgctatttttaatacgacggtcgcaccgatgattaagccgacagatgccataagctgattggatacgccgaacagcgcccaaatggaactgatgtcgcccgaatacagaagatagccccacagcaggcaggcgagcgcgcttgagaaaatcgagcccggcagccagtctgtttttttcagcggcttatagacctctccgaaaaactcttgaatcaagtaccgggcgacacgggttcccgcatcaatcgccgttaaaataaacaccgcttcaaacataatgacgaattgaaaaaagtatgaagccaaatgactgaaaaacggaatctccgtaaagatatacgtcattccgacggcaagcgtaacggctccgcccgttcttccttccagactgagcccgatttctttactcaattcaggcagatggacgacattcatcccgagggcgcggaatatttcaggcgtgctgttaatggcaaaatagtcggcgggctcaagagcggcagctgcaatgagcgccataattccgacgagacattccacaagcatcgctccgaaagcaaccggttttatatcactccatttatccagcattttcggcgttgtgccagaaccgacaaatgcatgaaagcccgaaatggcgccgcaggcaatcgttattgaaataaacggccagacaggacccgcgatcaccggccctccgccgtgaataaactccgttacggccgggaatttaatggcgggattgacgaaaaagacgcctgcgatcaaagcggcaaaaaccccgattttcataaaactgcttaaatagtcacgcggagccagcaaaagccaaaccggaagcgccgcggcgaaaaacgcatagacgggaagcgccactgcaagcgttttcgcatcaagtgtcagcatgtccccgagagccgttgtctgcagccgcggcccgattacaacaccggccattaacaaaagaaacccgacagttgatgcgagtttgagattgcccgtttttttatagtagaggccgacccccatcgcgatcggaatcgtaatccccaccgcaaacgttccccacgggtttttctcaagcgcgtgcagcacaaccatggacagacccgccatcgtgatcgtaatgataaacagcatggaaagaccggtgcaaaagcccgccaccgggccgagctcttctttggcgacttcagaaagcgttttcccgtttttccgcattgatgcaaacaatacgacaatatcgtgcacggctcccccgatcaccgctccgattaacagccataaaagcccgggcagatagccaaactgagctgccagaatcggtccgacaagcgggccggcagcggcgattgccgcgaagtggtggccgaatgacacccacttattcgtgggcacataatctttcccatcctcaagcacatgggccggagtcggtgtctgatcattgatttttaatactttgaccatcataaaggtaccgtaaagccgataggcgatcgccaaaatacatatagacgctatgacgattgtaatcgcattcatttaatcccagccccttttctctttttctaaatattatcataattatcagataacaggagatgatttttgcgtaaaaaaaagccggcagcggcagcccggcttttcggaacattattttcctgataaacggatgacattccaggacagcggagtaaaatgtgccgttatcccttcagcgtttgccgaagacgttccgttggagtgaggaatgacttcttttctgtttttttgattggttgctttcatatcctgatgctccagcacgatatgctcaatgatgcggtaatcttcaaaccccctcagtttgatctccgtttccatcggttccttgcttttgttgacggcaaaaatggtcagtgcttcatcctcttcatggtaaacggccgcggcatcaacatacggcacatccgtaaagtccgccgagtcgtatttcggggaggtgatcagcagcttcatcgaagtccctctcccgtagactgaggcgtgcatgtaagggtaaaagatcggctgcctccatgcttctccgcccttttcagtcatgataggcgcaatcacgttgacaagctgggcgagacaggcgatcttcagtctgtccgcatgctgcagcatcgtaatcagcagtgaaccgatcaacagcgcatcttcaaaattgtagatgtcttcgagaatcggccgggccgtaatccatggctccacttttttatccgcttcatttgagtgataccacacattccattcatctaaagaaaggtgaatcgtttttttgctgcgttttttcgctttcatataatcacatacggctgtgacggatttaataaaatggtctaaatccatagacttcgccaaatagttctcaagatcattttcatggttgccgtaatacgtatgcagtgaaatgtaatccacatgctcgtacgtatgctcaagcacctcggcctcccactcgatgaaggacggcatgccgctgtttgagcttccgcaagccaccaattcgatcgtcgggtccgtccatttcatcacctttgctgtttcagcggcaagccgtccgtattcatgcgccgttttatgaccgatctgccaagggccgtccatctcatttcctaagcaccatgttttgatgccgtaaggtttttcatatccgtgcgattttcgtaagtcgctccagtatgacccttcaggatggttgcagtattcgacgaggttccgggcggcatcgattcctctcgtcccgagattgaccgccatattcacttcggcgttcacttttttcgcccacgttaaaaattcattcgtccccacttcgttcgtttctgtcgtctgccatgccaaatcaagcctccgcgggcggttcttcaccggcccgacgccgtcctcccaattgtagcctgagagaaaattccctcccggatagcggatgaacggcacttgcaattccttgattaactcctgcacgtctgttctgaaaccgtccttgtcggctttcgggtgtccgggctcataaatgccttcatacaccgcccggcccatatgttctataaaagatccgtacatccgtttgtccacttcaccgatgatatattctttatctgctgtaatccccgcttttttcattacatttcctccctctctctatcccttcactccgcctactgtgaggccggaaatgaagtatttttgaaaaaacaagaatatgatgatcaccggcagtatcgcaaaaacggacccggaaatcagcatgtcatagttgttgccgtacggactcagcagccctgaaagtccgattggaagcgtaaacatttctttcgaccgaagcacgatcagcggccataaaaagttattccagctgtttaaagattgaagaatgatcattgctccgaatgccggtttcatgagcggcgccataattctgaagaaaatgccgaattcggtgcagccgtccattctcgctgaatcaagaagatccttcggaagtccgagcgcatattgccggaaaaagaacacggcgacaggcgacacaataaacggcagaatcacccccgtataagaatcgattaaatgaagacccaccgtcaatttgaacaacgggagcatcatcacttcaagaggcaccatcataatgatcagcacaagaacgaaaataatatttctgcctttaaactcgtagacaccgagtccgtagccgatcaaagaggaaaaaaacagcgtgagaaccgtggtgaggacgccgagcagcaggctgttaaaaaaccatttaaaataaatgctccccccgttgaacaaataggtgtagttatcaaggctcatcacatccggatcaagacgcagattcagcccgatgcgcatcagctcagatgacggctttaatgaaccgagcaatagacagatcatcggaaagatatacaacaggctcagcatgataaaaaacaaggtaaacgcgactctgtacacggaaaacatgtgattgttacgcaacgcttatccctcccctttaaacgaaccggacagtttcagtgaaacaaggctgactagtaagatgacaagcaaaaggacaattccgattgctgccccgtaccccatttcgttgtatgcaagcccctgctgatataaataaccgacaagcgtgaggccgatattgcccggggaattattctgccaaagcacatagctttcctcaaacattctgaaaccgccgatcatactgatcgttaacacataaacggacaccggctttaaaaatggaagggtgatatgccggaactttttccacgtactcgccccgtcaatttcagccgcctcatacaattctttcggcacattttgcaaacccgccagaaagtaaagaatgttaatccccatccacctccatgacgcaagcagcaccattaaaaacatgccggtacctttgttgttgagccagttttggggtgatgcgccaagcttcatcatcagctcgtttgcaagcgacgtattcatttctccgaacatcagccggaaaataatccccgctacgatcgtcgatgttaaagccggtacaaacagagccgatttaaacacatttctgaacctgacgagcttcgaattcagaatcaccgctaaaagaagcggcaccggaatcagcacgatcagcgtccagaaagtatattccaatgtgttaaataatgccgtataaaaggttggattaagaagagcggtataattggaaaacccgacaaatgtaatttctcccggcagtatccgctgaaagctcatgataaacacgctgatgatcggatacaaaaagaaaacgagaaacgaaatgataaatggcgccgtaaaaagataaggcgccgctttttttgaatacagcacattgcgccggcgcggcttcttccggactgcagaaacggtttgcgctgtctctgtctttacaggtctcataaaagctcccccgctttcactgttaaatagggcggcttctcctatttttctaattgctctgccgcctcgtccaaggcttcctcaggtgttttttcctgcgtcttcagcgcatcgaacagcacctgtctgacaacgagatcagccgctttagagaagtcttcatgcagataaatcggattgatctcatcttttatttcaaggagcgaggaaaaaattgacgtaccgttccggaagaaatccgtgtacttgtttttctccttcaattcttttgaatcccacacgtcccagcggagcgggtcaaagccgagcaccgtccacagctttatgttcccttcctttgaacctttcgcaaatccgagaaattctttcgcgagctccagatgttcagcctgcttcggcacgacggtggctgttccgcctaaacccgctgatctgtcaccgccttctttccaggccggcatagggtaaatcgccattttcccttttaaatcaggcatataatcgataaaccgtcccatgtaccaaatgggcatcagcactgaggctgccccgccctgattcataaaaccgtagtattcttcgctgtgatggccgccgccgggagccggcagaagggttttatcatttaccatgtcctttacatcattcagtgtatctgtattcgtcttgctgttcagaatcaattttccgtttttgctgtagtagcctgacccttgctgcgaaatcatggataggaatgtggcggagtcgtttgtttcaaccgttcccatcggtttcccagcggcttcacgcactttttttcctgcccgccggtaatcttcccatgtcttaatggaggcgggatcaacgcccgcttttttcatgatatccatgttgtaaaacatgacggtcgtccccacatgtgtatcaaggccgtacaattttccgtttttgctgtataaggccagacgcgcttccacaaacttatcgcggtctttttcaatcagcggcgtcagatcggcaagcgggatatccttccccttcagaaagttcgagaaccggcttaattccacgtcggctatatcgggaagcccctcacccgcgatcagcgaaaccgataaattatcatgcatttgtccataaggataaacaacggtattcagcttgattttgcgatccggatacttctgattccattctttgaccatttcctgataaaactgttcgtgcagaccgttaaacgtccaaaacgtcagctccgtttctcccggccggccggcagtccgttcttgtgaacagccggcggtaaacaagaagagcatcatcagcaccaaacatacagcggtcgtttttttcatgtcattaccccttccactttaggccgtgcggctattgatgcaaatgatgtgcaaagagcgctgcattttcatttatgatggttaaaccggtataacggtctcgcagtgtgtgcgcatgcttaagcgcatcgctgacaaggtccttttttacaccgatctcatcgaaacaggcgggacctcccgcagatgagagccacccggcaattgttttgccgtcgggaagcccttcatatgcggactgaatcgcctcgcgaaagtgcggcggcagttcagcaagcttttcgtgacaagccagttctttgtaaatatcactcagcaccgcgcacgcacagccgaccttcgcaccgtggagaatcggaggctgttttgccttcagcatttccatctcaatccaatgcgagatgtgatgctctcctcctgaggcggggcgggagtggtcaagagcaagcatgacaagacccgaaacgatcagcgcttccatcagtatctgaatgccggcctccgttcccatggcaatgtcagcgcggtgatcaatgcactgccaaagcgcgtctttcacaagcttcgccccggcttctgagtacggctcacccgcaagcctgcgggaaatctcccaatcagccagcgatgttattttcccgagcatgtctccgaagcccgcggctgtcattgaacggggcgcttcttttaatacattcgtatcggcaaataaggcgatgggcgctttcgtttgaatcgtcgttttgattccgtttaatatgagcggcgctcccgccgatgtaaaaccgtcgactgacggagcggtggggaatgagataaacggcaatccgcgctgataagcggcaaaccgcgtaatgtcgtgaatcgttcctgaaccggccgctatgataacatccgtctcttccgcgagattgatcagcgtatagaccaatgtcctctcatcagccgcggcggccccggcttcatgctccggaatgatgacttttgacgctttgattccgcctgcccttaattcgtccgcaagcagacgtcccgccgcctcgtacgtgttccggtcacagacgatgaccggatgattccagcattttttttgcagaaatctgagaagctcttcttttgcattcgccccgatcacgatatcttctatttgaatcggtgagcggctggccccttccttgtcaaactcggattgaatgtcctcaggagaacgtttcataaaaggattccctccttcgctaattctgtcaggtctttaatagaatcaaggacgatgtcaggttcatatagacggggctccccaagtttggccgaccccgtcagaaccaatatgcttttcattccgtacagcctgcccattgcgatatcagattcgaggctgtctccgattatggcgcattcctcagggggaagtccgagcgcttcacatgccgcctcagccatcagccaagacggtttgccgatgacaagctccgtttttgctccggcggatgcttcaatggccccgatcattcccgcgacatccatggcatgaccgccttcattcggaaaggagcggtctttgttcgtggcgatgatgcgcgcgccggaggaagccgccttaaaagcgagattcagatccttataggtgacggtttcatgcagggagatgacaagccagtctgccgcctgcgggttttgcgccaggacgacacccgctaaagcgagttcatcagtcagccctttctctcctaacacccagacctttgacaaaggataatgcttctttaaaaatgatgccgtcacactggaggacagcacgatgctccgttcatccgtgcggataccggcacccagcagtttctttctgcacattgcttttgatagattgccgcggttgcttaaaaagacaacggctttgcccagtgactgaagggtatgaacggcttcttttgcgccgtcaatcagctcccgccccctgaatacggttccgtctaaatcaatcagaaacccggctgcgtcaagtttggccataataagcattcgccccgtgttttctgtaaaaatgcttatcatgcagcactctgtcgatcggactgagctgtttgttcagcataagcgaatggtaggccatttccgctaccgtttcgagcacaacggcgttatgcagggcattcagcgcgtccgttccccagcagaacgggccgtggctgtggacgaggacacccggattttgttcatacggttcgttttgaaaggtttcggctataactttgcctgtatgatactcgtaatctttcacaatttcttcttcatacatttccctcgtgcagggtatagcgctttcaaagtaatccgcgtgagtcgttccgagagcgggtatgtctcttccggactgcgcccagctcgtcgcccagcgggagtgagtatgaacgattccgccgatagccggaaacgctttatacagataaagatgggtcggcgtgtcagaagacggtttcagcgagccttccaaaatgtctccgtcctcattcaggacgaccagcttgtcagcggtcagctcactgtaatcgacaccgctcggtttaatgacgattctcccgctctctctgtcaatgccgctgacattcccccatgtaaacgtgacaaggttatgttcctcaagcttcagattggcggcgagcacttcttcttttaacgcttcaagcatggcggctcccccctttcgcaaaatcacggtttttaatggctttcaggcgtttcatgacattgttttctttgccgaagtagtgtacgagctctttatattccgcatataagctgtcataaatctcagctctttcccggttcggggcataaaagccgtcttttaatttccccatatgcgcgcaagcttcagcaatattggagaatcctccgttttcccgtcccgcggcgagcgctccgaaaatcgcggagcccagtgcaggcgcctgcggagatccggataattgaatgtccatatttgtgacgtctgcgtaaatctgcatgacaaacggatttttttcggcgattcctccggctgcgtaaagctcctcgaccggaacgccgttttcccggaacgtttcgataatcatcctcgttccgaacgccgtcgcttcaatcaatgccctgtagatttcttcgggcttcgtgtgcagcgtcatgccgagcatcatgcccgtcaaatcggcgtccaccaaggttgaccggtttccgttccaccagtcaagcgcgagaaggccgctttccccgggaacaagttctgctgcttttttgctgagcagctcgtgaatgtctatgtgtttatcctcagcttccttctcatagtctctcggaacgcacgttttgacgaaccattcaaagtggtcgccgacacaggactgccccgcttcatatcccgcatatccgggcaaaatgccgttattgacgaccccgcacataccggggacgatatgttcttcctcgccgagcagcacatggcaggtagacgttcccatgatcatcagcattttccccggctctgtaataccgaccgcgggcactgacacatgagcgtcgacattggcgacggcaacggccgtccccggcagaagcccggtcagctccgccattttttcggtcaaacctcctgctttttccccgactgaataaatcgcgccgcttaatttatcctgtgtaatcgttttcattaacgggttgagcttttcgaaaaaatgatccggcggataccccgtctcctcattccagattgctttgtagccggccgtgcagttgcttcgcttcaatgaaccgcacaattgatagacgatccagtctgccgcttccacaatccgatctgccgccttgtatatatgcggcgcttcttccgcgatttgcatgattttcgggatcatccattcagaagaaattttaccgccgtatcttttaaggaatgtttcttttgtgtcttcggcaatcgtgttcaaacggtctgcatgtttttgagccgcatgatgcttccacagcttcacataactgtggggctcccgttcaaattccggcagcatacaaagcggctgccccgcgccgtctatcggtaaaatcgtgcaggcggtgaaatcaattcctatgccgatcacgtcttttggatcagcgcccgcctgctcaagcaggttcggaatcgccgtttccagaacttcgatataatcggcaggatgctgaagcgcccagtcccgagggagtttttcacccgtcttcggcagcgtgcggtcgatgacggcatgagtgtattcttttaccgcagacgcgatttcttcgcccgtgcggacattgacaagcaccgcccggccggacaatgtgccgaaatcaacaccaatcgtatacgccatatcaattccctcccagccggtataatacgtcattccatttcagctcttttttcagctcatgtatttcagtattgcgggaaataaagatgctttcaatgcctgccatctcagcccagtcaagcatctgttcagccgtaagccggaaggacatacaggtatggtgggcgcctcccgccagaatccatgcttccgcagctgttttcagcgatggctccggcttccacagcacccgcgccacagggagattcggcatatcatgatcaatttccctgccttccgcttcattcagaatgagacggaaccgcccgccgatatcaatgatgctggcgatgatggctgaaccgccgattccgttaaaaaccagccgggccggatcttccttccctccgattgagagcggatggacttcgattttcggctgatcaagggcgatcgtcggacatacttcaagcatatgtgatccgagaatcatcgcacgacccggttcaaaatggtacgtataatcttccatgaaggaggtttgttctccgtccgccattattttcatcattcgcacaagggcagccgttttccaatcgccttcgccggcaaatccgtaccctttttccatgagacgctgaacggcaagacccggaagctgcttcattccgtgcaaaacttcaaaggaggtcgaaaacgctgtatatccgccccgttcgagaaaggccgttaatccgagttcaattttcgcctgttctttaatggaagcaacttttgcttcatcccgcttcgtttcgtcgctgatgacatacaatttgtcgtattcctcataaagcgcctcaatttctgcgtcggtgacattgttcatcacctcggtaagatcgccgattccgtacccgtcaacctgccagccgaattgaatgtgggcgccgactttgtctccgtcagtaaccgccacattccgcatattgtcgccgaaccgggctactttaatattcctgctttcattccaagcggcagccgtgttcatccattgcgaaatgtcatgtttgacttcctcatcatcccaatagcctgcgatgacttttctcgtctgccccattcttgactggatatatccgtactcccggtctccgtgagcggattggttgctgttcataaagtccatatcaatcgtttcccacgggatgtcgcgatgatactgggtatgcagatgaagcatcggcttttgaaaagcggaaagaccttcaatccacattttcgcaggggaaaatgtatgcatccacgtcacgaccccggcacagttttcttgatactgcgcttcccgcaaaacctctctgatcgtttcagatgacgtgacaaccggtttatgcctgatcttgtatcttgatgacaccccgctgagaccgtcacatattccctttgcgtgtttatcgacaagctgcagcgtttcctctccgtataagtgctggcttcccgttacaaaccaaaattcatattctttgttctgaagcacattcatttccccttcccatcaaaataaagcgcttgcatttttaaataaatatacgtacgaatataaataataaaacttttattcttttatttgtacgaacaactttattatagttaaggaggaatcaaactgtcaatcttttattgcaagtaaaaaagccggacacacatgcccggctgatcaattaataggaaggccagcctgaactccaatcgatatcattgatgagcatcttcggaattccgctgttttcggcatcatacgcatgacgcactaaaatattcccgttcacaatgtcttgaccgcccgggcctttccagcggtcattgccggaatcaagaatcgtccctccgccttcagacatgcttttcccgcttttatcgagatatgggccggtgatgcttttggatcttccataagcgattttgtacgtactattcaccctgaacagcatttatcaaacgacaccattaagtaatagtagccgttctggtaggtgatggccggcgcttccaaagctccgccgttattcggtctggcagcgatggaataaagtgatcccgtcggtttcattgtatttttatcaagctttgtcagcttaatgccgctccaaaaagaaccgaaggcaagccaagggtttccgtctttatcaattgtcagctccggatcaattgcattgtagttattggcgcttgtcgaacggatgacaagcccttcgtccttccagtttcccgaactgaggcttgtagatgatgcaagaccgatcgcggaggtatttttgccgaatgaagaaacggcataatacagccaatactttccgttaaaatattgaacatcgggggcccattgattcagcccgtaattcggcacataattgccccaccatgacagcggggaagtaaagattgatttctgaacggtccatacgccgccgctgcccgcctttaagacgcgaagccccctctccccttccaaaccggttccgaaagcgtaccacgtgtttccttccttcgccattgtcggatcgtgaagcaattcatttgatgccccccaaaacgcggcagatgccggagatgaagacatcagaagcagaccggctgtaacgactgcgcatgaaaagcggatcatgcgtctgaatctgtttttcatttgtaaacctccctttttttaaagcgctttcaaaaacatgttgtcagatttttctatgtcttttcttattgtagacgcaaggctcatatttgtacagacaaaaaaaaaagaatctgcttaaaaaagcagattcttccgtatctttattgataagtaatacggtcaaccgtttcccggtctaattttttaattacttctgtgatcaattttaccgtattctcataatcatcccgatgcaaaatagcggcatgagtgtgaatgtagcgcgtcgcgatcgtaatggacagcgccggcactccgtttgcggttaaatgaatagaacctgaatccgtgccccctccggcaatggaatcgaattgatacggaattcccgcttcttccgccgtgtttacgacaaggtcgcgcagccctttgtgagataccattgacgcgtcatacagaataatttgcggcccttcgccgattttgctttgcgcctctttttcagaaattcccggtgtatctccggcaattccgacatccacaccgaacgcgatatcaggctggatcgtatgtgccgctgttttcgccccgcgcagcccgacttcttcttgaaccgttccgaccccgtatacttcattcgggtgatcactgtttttcagattttttaatacatcgatggcaatcgcacagccgatacggttgtcccacgctttcgccaataaatgcttttcattgttcatcactgtaaattcaaaatacggcacaatctgatcacccggaagaacgccccattccattgcttcttcacggctggacgccccgatatcgatgaacatctctttaatatcagcggctttttttctggcgtcaggaggcagaatgtgaggcggtttcgaaccgatgatccccgtgatgtcccctttttttgtcacgacggtgacgcgctgggccagcatgacctgagaccaccagccgccgacggtttgaaagcggagaaagcctttatcagtgatttgcgtcaccataaaaccgacttcgtctaaatgccctgagatcatgattttcggaccgttttctttgccggtttttttggcgattaaacttcccagccggtctgttgtgacatcatcggcaaatggttctatgtatgatttcatcacttgtcttacttctctctcatttcccggtatcccttttgcatccgttaacgctttcagcatggtgagcgtttcatctaattttgtcatcaataaacctcctttttttcactacccttcttattatacaaaaccaatgctgaagcatacgattaattcgcctgaaaaacgggtaaatgtttttatctatttcttttaaaaaaatgaaactttttgttttgtttttcgtattacatcagatcatgacaaaggtgaggaggtgccttcacacatatggccattacagtattgaggattgtcttgcttgcacttcttatttattttatttacatgtgcgtcaaattttacgcaaacccgaaaagaaggctcagactggcgcaatcaaaagagaatttttattttattgacgaacagaaaaacacgcgaaaaaatctccagcttacttataaaggagtgctctttgaaggagaaaagcatatcccttccaaagatcatccgctgtttatccatacaatatttgtatggaccgaaaatccggaaaagctgaaccgcttttctgcagatgattttgaagaagtcgaaaaaaaggtattggagcggtatccgaattgcaagattgattgggaccagcccatcaaaaaagcgaaaaaagcaggcgagcgataagctctcctgctttttattttttatacatcaaatacatgagcacaagggcggcttcagtgagaaaaagcagcggcaccccgtataaaaaggatttgtgcttcgtcttatgcctgaaggtgcgcatgccgatccatacgccgagtgagccgaacatggcggctgtgagccatattcgtttctctgatattctccacctgtgcgcctttgctcttcttttatcagcgcccatgatccaaaagccgtatccgtttatcaatacggcgtaaatgaagagagccattgattgtcaccctttacgtaaaaaaaccgctcccggaaagagagcggctttttcaacttacttgtctaactgagctttagcagcatcagcaagctgattgaaagcagtaagatcgtttacagcaagatcagcaagcattttgcggtttacttcgatgcctgaaagcttaagaccgtgcattaaacggctgtaagaaagaccgttcatacgtgcagcagcgttgatacgagtgatccaaagcttacggaaatcacgttttttctgacggcggtcacggaatgcatagtttcctgatttcatgacctgctggtttgctactttgtataatgtatgttttgaaccgaaataaccttttgctaatttaagaacctttttacgacgcttacgtgtaacagttccgccttttactcttggcattagatttccctcctaattgttccttgtccgattacttgatgttggcaagctgttgtttgatgcgtttgaagtctcctgcgctcacaatagcacccttgcgaagcttacgcttttgcttttgggatttgttggcgaataagtgacttgtgtatgcatgagaacgttttaacttcccagaacctgtctttttaaaacgtttagcagatccgcggtgagttttcatttttggcatgggatttcctccttattgcttttcgtttttcggcgcgagcattaagaacatgctgcggccgtccatttttggttttgtttcgactgtcgcaacttccgcacatgcttcagagaaacggtccaatacgcgctggccgatttctttatgagtgattgcgcgccctttaaagcggatagaagctttcactttatcgcctttttcaaggaatttaatcgcattgcgcaatttcgtgttaaagtcatgctcatcgatcgtcggacttaatctaacttcttttaagttaatgattttttgatttttgcgtgcttctttgtcctttttctgctgctcgaatcggaacttaccgtagtccatgatgcggcagacaggcggttttgcatttgctgcaactaacacaaggtcaagatttgcgcggccggcgatttcaagtgcttcctgacgggacttgatgccgagctgatcgccattttgtccgatcagacgaacttcacgtgcacggataccctcattaaccaattgatctttgctaataatgagccacctccatagtttcttcgaattgattcacaacgctttttgactgcattctgcaggcaaacaaaaagtgcgggcatgacaacacacccacactacgaacatctgcataaataaaaatgtacggtcaacctgccaactacatgaatgtgtcaatcaggtgagaagcgggtgcctctgcttgtgatttatattcaattcaataactattctacacaataccggatcattagtcaagaatgacttctccggatcaactttttcattttaacacgatgccggggtgagcgcaaggaaaaatgtgaaatttcgttctttgccgcccgcggacgtgccaacacaataaaaaacccgggtctatgacccgggtttatcctccgatgagctgaacgaataccggaatgaccagcaccgtcaccactcctacgacgacaaccgcgatacttgccattgccgcttctacttcccccatctcaatgccgaccgcaacaccgagtgcgtgtcctgatgtgccgagagccagtcccttagagattgggtgctttactttaaacagttttaagaataaagcgccaagagcatagacgataacggcgttgaaaataacggcgaaagcggtgatgtcggtgatgccgccgatcccttttgacagcggaagggcaattgccgttgtcgccgcctgcggaagcatgcttttcataacggccgcgtcgagatgaatgccttttgcgatcaaatagacaatcgtgactgagcagatagagccgacaatgatggaagacatgatctgccaccagtattttttcagcttggcacgctgtttgtataaagggatggcaaaagcgatcgtcgcgggctccaggaagaatttaataatgtctcctccgcttttataatcttcatacgaaaaaccgccgagcttcagaaaaagaattccaagcaccatcgcaacaaacagcggggtgaagaggaaaaagcctctcgtttttttaaataaatacgtgccgatgccaaaggccgcaagtgaaacgacaataccgaaatatggactcatccgttttccctcctaatgctgcacaagttcgttttcctgattggaacggcgcaccgtttgtttatcagccggagcagccttctgacgtttttggctgacagacaagatcagctgagaaaaaaggcctgtcgcccctaacagaatgatggtggcgagtaagatgacgagtgcgatctgcacgccgtactgctgcatgacgccaagtgaattcatcacggagatgcccgacgggacaaataaaaatccgatcagtgacgttaatgatgttcccagcgtttctacttgttcaagcttaatcactttcaggcataagaggacaaataataacaccaaacctactacggaagcgggtataggaatggggacaatcgctgcaatcccattagatatgagcataactacggcaaaaataaatgcttgtgtcagaaatccgtacacttttttcgcactcattttcttcacctctttctctttgttaggtccattataaaagagaaatcgatttttaaagcgctttcataacaaacggctgaatattcattctgaaatgcaaaaaacggctgctgaaatgcaaaagccgcctcatataatatgaagcagcttttttaagtccttggcgtatgtacggctgacgggaattttagaaccgtcttttaatatcagattgtaagtcgaattaaaccacggatgaatttccgtaatatgctccgtattcacgatgaacgcgcggtgcactctcaagaaacccgtatcaggcagttttttctcaatgaccgccaaagtttcatgaacggaataagacgcggcaaacgttttgacggaaacgtgtccgtcctccatgccggcgtaaataatgtccttcgtatctaaaatgacaatagattcaccggctgatacagccagtttatgcgctccggctgcggacggcagctccgagacggctcctgccctgtcctgcttcactcttttaaactttctgatcgtctggcgcactctttcttcatcaaaaggcttcgttaaataatcgagtgcgtcgacttcaaaagcttttaaagcaaattggtcatacgccgtcgcaaaaacgacggccggcggatttttcatgtttttcagccgtttggcaatatcaaatccgttttctcctgacaaatcaacgtccaaaaacagcagatccggtttttgatccatcatactgtcaaaagcggattcaatattttcagcttcgtttatgtcacttacttcattcgtccgtttcagcaaataagctaattcatctcttgccagcatttcatcatcaacgattaacaccttcagcatgttcttctcctttagtcatcagtttcaaaggcagctcaaatgatacgtccgtacctttgccggcctcactttccaatcgcagggctgccttggggccgaacagcccgatcagccgctgatttaaattgtaaagcgcggttcccgtcccttctttagacgggagcggacggtttccgagcacggacagcaattccggatcaattccccgcccgttatctccaacccgcattaaaaccgactgaccggcggataccacgctcacattgacggcacagctgtcctgctttcttgaaaatgcatggcgaagcgcattttcgacgagaatctgcagcacaaaaggaggaatttcgatgtcctccaaaccgcgttcgatttcaaggctgattttatatttcccaggaaaacgggcctgctccaatgataaatacgcctgcagatggttcagttctttagaaagcgggatgagcagctgccttgccccctggagattggaacggaaatagacgctgagctgcagcagaagctttcgggttttttctacatccgtacggcaaagagcagaaatcgtattgatcgcattaaacagaaaatgcggattgacctgtgcttgaagcgcttttatttctgcgtctttcagcaatttgctctgcagttccgcctcgccgagttcaagctgtgtggaaaacagcatggcgagtccttctgcaagctcttcttcaacccggcttaaacctgacgggcttttaaagtacattttcagcgtcccgatcgttttgccgtttgacgtcagcggcaatacaatcgccgcatgcagcggacagggatcgtgcgtgcattcaatttcttcctttgatgtcgctttcataatatgacccgttttaataacgcgctttgacaatccggtaatcaggctttcagacggaatatgatggtcggcacccgcgccgacgtgcgccaaaatcttttcgttatccgtaagcgataccgcgtccgttcctgtttgcctgtgaatgatggcggcgacgcttttgcatgagctttcattcagcccctggcggaaatacggaagcgtctgatcggcaatcatcagcaccctgtgggtttcaagggctctcgcccgttcttccttccggataatcgactgaatgatcgaaagaaaaataaaagtccctgacccgtttaccaatatcatcgggatgccgatgatgctcacaagcgtccaagcgtcagaaaacggcttggccatcaagaggatgagcagcatttgcagcgattccatcccgagtccgacaagcgcggccacacgcggtgtcggcatcctgtagcgttttctgaaataccgtccgatccagccggacaaaatgcccgctaaaacggatgagacggcacagctgactgcggtcgcgccgccgagtgataaacgatgcaggccggccagtatgccgacgccgatccccacataggggccgcctaagagtccgccgatttcaacgcccataattcttgtattggcaattgaaccggacggattaatttgaaacacccagtcattattcatgattgtattctgctgaatttctattcccgtatagttgctgatgatactgaacagcgagaaaattgaaatcagcaccgctttgcctttatagctctcaggctgctggagcgcctgtctgaacaatctggtatgagccagaacaaatcccaatatgacgataattccgactctttccagcatcatgatgatcaaatgcagcatacttttcacctgttctttcaaattttattttatcacgttttagagcccgagacagaatctgacacaaacctgcctgtttttttcaaatcatctgaaaacaaatctttcacagtctatgtatctattgtagaataaacgggagccttgcggcagagagtttcagaatataacaaagaggagaagatcatgaaagccgtattttttgatttggacgatacactgttatgggatgaaaaaagcgtcagaacaacattcagggaaacatgtttacaagcggaaaaaaaatatggccttgacccgcaaacatttgaagaggcggtacggaaagcggcacgggaattgtatatgtcatacgaaacctatccttatacggtcatgatcggcattaatccgtttgaaggattatgggcgaatttttccgagccggtcagcgaaggatttaaacagctgaatcggattgcgccggaatacagacgaaacgcctggacgaacggcttaaaaagcgtcggtatagacgatgcggcttacggcgaatatttggcggagtttttcgcggcggaacgcagacagcgcccgtatgtgtatgatgaaacgtttgcggtgcttgataagctgaaaggtgtttatgaattgcttctgctgacaaacggcgatcccagcctgcagaaagaaaaactagccggcgttcctgagctcgcgccttattttaatgaaatcgtcatctcaggcgctttcggaaaagggaaacccgatgcctccatattcgaacattgcctcggcctcctgaacctgaaaaaagaagacgccattatggtcggagataacctcaatactgatatattgggagcgaaacgggcaggcattacgacagtctgggtaaaccggacacaaaagaaaaatgatacggacattgcgcctgattacgtgatcagcgatcttcacgagctgtttgcgattatagagaaacaaaaagaaagataattttatacgcaaaaaaaccccattctgaatgaacggggttttttgtatttccggttattttttcgcttctgctacagcctttttcacaaaatcgtccaatgagacggtttctgatttctgctcgccgtatttccggacgtttaccgcgccgttttccgcttcttggtcaccgaccacaagcatgtacgggattttttgcatttgcgcttcacggattttatagccgattttttcgtcccggctgtcaagctcgacacgcaggccttcgcgctgcaggcgctcctgcacttttttcgcgtagtcaagatgcacggacggtgatacaggaatgacttggaattgcaccggcgcaagccatgtcggaagggcgcctttgtgctcttcgattaagaaagcaacgaaacgctccatcgttgatacgacgccgcggtgaataacgacagggcggtgctgtttgccgtcttctccgacgtaagtgagatcaaagcgttccggaagaaggaagtcaagctgtacagttgacaatgtctcttctttgccgatcgccgttttcacctgcacgtcaagtttagggccgtaaaacgccgcttcgccttccgcttcataatagtcgtgccccatctcatccattgccgccttcagcatggattgcgctttgttccacatctcatcatcatcaaaatatttttccgtatcttcaggatcgcggtaagacaggcggaatgtgtaatcactcagtccgaagtcttcgtatacgtcttgaatcaaacggacggtgcggatgaattcttctttaatctgatcagggcggacgaaaatgtgcgcgtcatttaacgtcatgccgcgtacgcgctgaagacctgaaagcgccccggacatttcataacgatgcatcgttccgagctcggcgatgcggatcggaagctcgcggtagctgtgaatgtcctgtttgtaaatcatcatatggtgaggacagttcatcggacggagcacgagtgtttcattgtccatttccatcggagggaacattgtatcctgataatgatcccagtgccctgatgtttcgtacaggtctttgcttccgaggacaggcgtatacacatgctcataaccgaggctcagctctttatccacaatgtagcgctcgatcacgcggcggatggtcgcgcctttcggcagccagagcggcagaccttgtccgactttttgagagttggcaaacaattttaattctttgcccagttttcggtggtcacgctctttcgcttcttcaagcatgcgcaaatgctctttcaagtcatcctttttaaagaaagccgtgccgtaaatccgctgaagcatttggtttttgctgtcgccgcgccagtatgcgcccgcaaggctcagcagcttaaattctttaattttgcctgtagacggcacgtgcacgccgcggcacaggtcaaaaaattcgccctgctcataaatagagaccgtttcgtcttctggaatcgcatccagcagttcaagcttcagattatcgccgatttccgcaaacatggcttttgcttcatcacggctcacttcttttcggatgatcggcagattttcaccgatgatgcgtttcatttctttttcaatcttcggaaggtcatccggcgtcagcgcctgctccatttcaacgtcataatagaacccgttttcaatgacggggccgactccgaatttcacatctttataaatgcgtttaatcgcctgggccaataaatgcgccgtgctgtgccgcatgatgttcaaaccttcttctgtgccttctgtaatgatttctacggcaccgtcctcttgaatcggcgttcttaaatcaatttcctgtccgttcagttttccggctaaagactttttctttaatcccggactgatggatgccgcgatatcttctgttgtagttcctttcggaaattcctttaccgctccgtccggaaatgtgatgttgatcatatctgacatcttcgtcactcctttttttatgcaaatcaaaaaccccgccccctatgaaagggacgaggttaaataaacggaatcgtggttccacccttttttccgcgcggccgattgcttcggcactgcggctctaagctctgtaacgggagttcccgtcagctattactggcgcttattccggcgttcacagctgaagttcaaaggcggtaaagacaatgatccatagctggaaagctttcagcctgggctctcctctcttatacagccggtatcaatgcttcatgtccttatcaatacgtgtagcaatcattaatcttttatgtattataaaatgtctgtgagaaaaatgcaactcggttttccgtctgatttcgcacagacagccctgccgcttacacaaggccgtccgtgcggctatccttccgtcttctcggctgcaaacgcgcccagcggaaaaaggcgcaccctctcctgaaacacgttttgaatggttcttgacatcatatgttccggtttgtccgtatacagttcgaccgtctcaggcgcaatggagatcagcggcgcaaggagatgggaatctatatacatcgggtgctcccgcacaaaccgtctgtctatgtattttttctgttcccgttcagacacatagcgcagctcccacagcgtaaaagcccggtcatgtacgatgcggactttcttcatccgcggcggattggatgtcacataatctctcagagactggataaagttttgatattcctgttccatccggtattcatctatcgcggcctccgtatattctctgagcctctcataatacctgccgagccggaacgtctgaaacgaacgcacggaaaaaacacccgcatcaagtgaaatcgttcggagcgcatctgaaataaactgtgtgcgcggctctttcttcggctcaaacggatgatcctcaagctctccttccataatgctgtgtgcaagctgaaggatttgctgctgttcatcctgatcggtgaagcagtatgcgtcctcaataagcgaaagcatatgctcgtcttctttgcattccaaaaaaaacctgacaagtatcggctcaataaagcgctgaacgcaaaaagccgtttcagaccttgcgattccgactttttttatgccttcacggacaataaaatgtctccggtcgtccgattgctgaatgagatgtaaaaaagcggcggtatcgtggtcatcttcaaagatcacttcaagcatatttgtccccccttacggcatctgttacaagtatatgggggatgtttttaaaatagacgtaaaggttagctttcaccgccgaacaaatgacgcaccttctttttaaatataacgggaagcgataaaaatacgacgtaaagacagatcacgcagagtacggccagcacattgccggacataaagctcgcgccgagcacattcaggacgatcgtccccggaatgatgcccgctgcggtcgccaaaaaatacgttaccggcctgactttcgataggcccgcggcatagctgatcacatcaaagttaacaggcagaatgcgcaggataaaaatataaaagaagccattggttttcatctgcttttgaatggcttccatttttccatgacggcttttctcattaaaggcaaacagccccgccgcaaaaaaagacgcggcggcagcgcccattgagcccgccagcgtatacatggtgccgaaaaacgggccgaacgccaatcctccggcgacggaaacgattgatacgggaaacagcacaaaaggcctgacgatggaaattccgataaacacaagcggcgcaaaaacaccgaacgataacacccacagccggatctccttaggcgacagattcagatatttgcggtttgcccacagcaaaagacccgctcccgccgcagccgcagcccaagtgacagccttcttattcctcattccctcaaatccttcccattggacgccggcatcatgaacggcggcggttttccccgtcaagacggacgggcgaagccaaatataaaatccgctccatcagtcttgccgcttttacttcttccttttctccccgctgtgaatacgtaaaatgatgcttcagctcgtctggtgaaaaattagacgagaagaaagtgggaagctgctggctcattctgtgctgaagcacggtgccgatgacttcatccctgacccagcttgtcattgactccgctccgatgtcatcaagcatcagtacgggcgtcgttttcaccatattcagtttcgcctccagcgactgatcctgaagcgagtttttcagctctctgacaaattcgggaacatatacgatcattgatgaatactctttttccgccagttcattggcaatggcggctaaaataaatgtctttccgattccgaattttccgtacagatacagccctttgccttttcccgtttcattatagctcttcagaaaatccgtcacatgctggaaaatgccgagtctgctcggatcggtaatgtcgatctgctgaaacgtcgcgccgagaagatcctgctggatatacatgctcttcatcagggacttttgccttttctggcggtcgagctttctcttttccggacattcgtaatattcaatatcaatggaacgcccgttgatcacaagcttcggatggtagccttcaagcaggctgttcgtccggctgtctttcgaacagaaggcgcactgtttactttgctgaacgaattcgtacagtttatttaaccctctgtcaatcatgctttgattgataacatctttctgttccttcaaaaaagcctggacgtcttcgtcggccataacttgctgctgcattcgttccaggcgtttttgaaagtcaggtcttttcgtcacgccttctaaggatcggctgatcggttccattcaatatcaccccgcttctctgtctcaataggcagagtattttttcagttttttcatttcttccatcatttttttcttctgttcttcaagatcctgtgcggaaagagccgtctgttcttgtttcttcccggtttcttcttctttcatccaatcagggcgcttttcttcccggacggtttttttgccgcgcgccgcgccgtttgttttgccgtccgcccaatcaagatattgcctgtgctcttcgattgcgagcttcattgcttcccgtaccgttttgactttctttctggcccagtgggcggcgattttttggatatagtttttggacagcttcatatccgttttcagcatgacataataaatcagcacattggtgacgccgggctcaagcttttgttcgaacataatatcggcgataatctgcaggtcggcttttgacggctcggtcccgtccgcaatgtcctggagaagctttctcggtgatatggtctcaagctgtgcgatgagttcgccgttcaatgaatcgtccttttccgtccggttttctctcaaggtgacaggctgtgttttatcaatcagttcgggaagcttgccgcttctttcaatttggtaccagtcgctggccgctttcctcagcgcttcggccgttatcgtatcctgctcattaattgcggtcatgacgacgtgctgcatggagataggatctattccgtataaatatgaaagctttttaatgctctcccgcacatcctgtgtgattgatttgcgcggtatcatcgtttctgataaccccgccaaaaacagctcaaaatcaaacacttcctccgtcaccgtataggaaggcgcttgtccgacagacgccgtctcatagtcctcggggagcttcatcgcctcttccatatcaggcgtcattttccattcactcggctgaaaagaggcaaaagcgtgattaaacggacgggtaatttcccttgcgcccgcgccgacggaagggtgcgtgtaaaattgtctcagctgctggtatttcgttttaccgactctgttataaagaaagacattcagcatgccgtcttcaaaaaaatcattcggcctgagcgggggcagcagctcataaataaacatccgctctttttgctcggactcccggatatacactttcagcagtccgattccttcaagctttccctgttcatgatgaatcttttttaaatttgactgcatcatgcccatcagctgcctgtgcgtggattccgctccccacaagcggttctgctcaagctccccccataaggtcatataaagggagaatgcaaaagaaccgatcagcggctggtacagatgtgtcaaaacctgtctgtcgacatcctgaagaagcgaacggcttttgaccgtataaggatctacaggcaatacgtcattccaatagtcagccatgattctcaaaccttccgatatgtttctactctcattttacaccgtttctgcgatctatcaaatgccaattttgctcatgagaaaagagccagacacaatctcttagctctctcagcgttctttctttattaaatctttcaattcatcgataaacacgtttatatccttaaactgccggtagacggaggcaaagcggacataagacacctcatcgattttcgccaggcggtccattaccatttcaccgacaagttcgcttttgacttcagatacgccttggtttctcagctctttttcaatgtcaaagcacatgtcttccaatgttttcaaaggaacgggccttttttcacaagctttaattaacccgcgcagcattttttcacggctgaattcttcccggacgccttcttttttcacgacgatcagaggcatctcttcaaacttctcaaatgtagtgaagcggtaatggcaggcttcgcattcccgccttctgcggattgatttcccttcgtccgcaggccgtgaatcaagtacgcgggaaccgttatgctggcatgaaggacatttcaaattggatcagctcccatctgtttcgttgctgtaatgcggttcgcaagcttccggtaaatgcccgccaacgtttctaggatgagcctatttgttgggagagccgatagaccggccttatcttttctattttacaaaaaaaatgcttaaagaaaaagcaatgctgtttttttacattagaaaaggagcatcagcttcaaagcgcgtaatggctttttcagcttagctcccttgtgtttgcgttttgaaaattacagtactttcgcttgtgcctgtttaatctgtacaggccccattcctctcggtatttcaatgttttctcttgtatctgcatgtaatgcgtccgcaatgtaatccgcagccacattaggatccaggtctccacaagtataaacatcaatgcttgcatatccgtgttcaggaaaactgtgaatcgttaaatgtgactcagagataataacgactccgcttacgccttgcggtgcaaatttgtgaaatgcgacctcgcgcacttcagctcctgatttcaaagcagcatttacaaacgttttttcaataaaatccatgtcattgagcttatcaaaatcgcatccccacagctcggagatgacgtgacgccccattgtttccataatcatggacccccttaacaagaattaaaaaagtgaatttccgagaactgacccggccatttaccacgggggaaagttagtccggagaggtcctaaccctttaagtaattccgaagcagtcacgagcaagaagttcacgaaagatagtatactgtgtttaagtttattttgcaaggtgtgttttttgcgaatatgccgttaagggtttttttctaacaaatgtccatgatctttagtctacacagctgacgggtgtttcattcgcgcggcgacgtgacggataagatcaacgacccggcaggaatatccccattcattgtcataccaggcgagcacctttacttttcggtcttccatcaccatcgttgtcagtccgtcgatgatcgcagagtgtgaattcgtattataatccgaagaaacgagcggctcatccgaataatcaagaattccgtacatcgacgtttttgaggctctttggaaagcggcgttcacttgctcggccgacacatctgttttcagatcgcagacaaggtccactaatgacacattcggaacgggaacacgcaaagcgagaccgtgaagttttcctttcaaatgaggcagcacgagcgacagcgctttagcggcgcctgtagaagtcggaatgatggattctccgcacgctctcgccctccgcagatctttatgcggattgtcgatatttttttgatcattcgtgtaagcgtgaacagtcgtcatcagcccgctttcaatcccgaattcctgatcaagcactttgacgaccggcgcaagacagtttgtcgtgcaggatgcatttgaaataatgacatgttcatcgggattgaactgctcttcatttactcccatgacaatggtaacgtcttcatttttgcccggagccgttaaaatgacttttttcgcccctgcttcaatatggctcatcgctttttcttttgaattaaatttccccgttgcctctacgacgatgtctattccgcattctttccacggaagctctctcgggtcccggcgattgaacagcataatatgttttccgttgacgatcaggctgtcgtcggcggtctcaacttcttgatggtatttgccgtgaattgtgtcatactttatcaaatgagcaagcgtttccgggggatagcttgcattaatggctgttatttgaatttgatcatcttccattgcttttctgaacaccattcttccgattcttccaaacccgtttattgctacttttaccttcatgctcaggtcacccctttttaatatgccactctaatttacctttatttatatatagtataacacattaaaagaaatccgccagtacaacttgataaaaatccacccttataccgatcaatatgttgttcaatcggtttttttgcatataaaatgatttttcttccataaaaaaagcaggatcagcgtctcaggctgcctgcttttttcttatatttgtcccggttctttaaatttgtcattcaaaatgctgtcctctaaaacggaagacacctcgccgtaccgtttagcaatatgcatcgcgccccagtcacacagcgcatttaaaattctttccagactgtgcccgtattcactcagctcgtattccactttcggcggcacctgattgtacacgatccggttgatgacgccgtcagcttccagctcccgcaattgctgtgtcagcatcttctgggtgatgtccggcataagccgcttcaattcgcttgtccgttttttcccgcgcatgaggtggcagaggatcacacacttccattttccgccgatcacttcaagcgccgcctctacggatatattgtattttttcttcagcaacggtaattcctcctcatctataggaactaaaaagtgcctatggcacttaaaagtacgttcttttcaatgacacttctatcaatcataatgacatttgccggctgaaaaggaatgtactcttatacttatatcgtttacccggcatcatttcaaccatacattatcgtttaaggaggaaaacagatgtcttcacatcgccaaagctatttaccagcgctgctggcattagccgtcagcgcttttgcgatcggcacaaccgaatttatcagcgtcggactgctgccgcttatatctcaagatctgcatatacctgtgacaacggcgggacttaccgtttccatgtatgctctgggcgtgacattcggcgcgccggttttaacgtctctcacatccggcatgtcgcggaaaacactgctgctctgggtgatgttgatttttatcgccggaaatacactcgcagcgagcgcttcctcaatcggcgtcttactggcggcacgggtcatttcggctttttcccacggcattttcatgtcaatcggggcaacgatcgccgccaatatcgtgccggagcataaaagagcaagcgcgatttccattatgttcacggggctgacggtggctacggtgaccggcgttccgttcggcacctatctcggccagcaattcggatggagaatcgcatttgccgtgattgtggcggtaggaatcatcgcattcctcacaaacgcgcttctcgttccgtctcatttgcgcaaagggacgaaaaccgcattttccgagcaggtcaaactcgtcacaaacggccggttattgcttttatttattattacagcgttaggctacggcggaacgtttgtcgtgtttacgtatttatctccgcttcttcaggaggtaacgggttttcagaaagaaaccgtcgcggccatcctgctcatttacggaattgcgattgccatcggaaacatgattggcggccgtttatcaaaccggaatccgctgaaagccttgttttatatgttcattgtccaggcagctgtgctgtttgtcctgacttttaccgcgccgtttaaaacagccgggctgatcaccattattttcatggggctgttggcgtttatgaatgtgccggggcttcaggtatatgtcgtgatgctgagtgaacgttttgcgccaagcgccgttgatacagcatcagccttaaatatcgcggcatttaatgccggaatcgcgatcggctcgtttgccggcggaatcattacagactcaatcggaatcattcataccgcttggatcggggcgctgatggtgctcagcgcggtcgtattaaccggatggagcaggaagctggaaaagcgggatcgcactgcccttgaaaggaggtgagtttttcttcagcgcattttgatttttttcgacagacaaataataggaggaatatatacatgacaacacatttacaagcaaaagcaacattgcataacggagtagagatgccttggttcggcatcggagttttcaaagtagaggaaggcgcggaactcgtcaacgcggtgaaaacggcattggtgcacggctatcgcagcgttgataccgccgcgatttacggaaatgaagaaggtgtcggcgaagggatccgccaagggctgcaagaagcgggattaaaacgtgaagacatttttgtcacgtcaaaagtatggaatgccgatttaggatatgaagaaacgttaaaagcgtttgacacaagcttagaaaaactcggtttagattatttagatttatatttgatccattggcctgtcgaaggaaagtacatcgatgcgtggcgggcgctcgaaaccctctaccgggatggacgcattaaggcgatcggggtcagcaatttccaaattcaccacctgaaacatctcatgaaagaaacggaaatcaagccgatgatcaaccaggtggagtaccacccgcgcctgacacagaaagaactgcttgctttctgcactgaacaaggcattcagcttgaagcgtggtcgccattgatgcaagggcagctgcttgatcaccccgtattacaggagattgctgagaaatacggcaaatcagccgctcaagtgattttgcgctgggatttgcaaaacggtgtcatcaccattccgaaatcaactaaaaaacaccgtattgaagaaaatgcaaatgtctttgatttcgaactgtcagctgaagatatgaagcggattgatgatctgaacgaaaatctccgtgtcggtccggaccctgacaattttgatttttaaccagaaaaacaccgttcggctttccgaacggtgtttgtttatgcccagccgctcaatacttcctcaagctggtgctttgtatattcaagactgccgctgttatcaatgacggcgtcagctttttttgctttgtccgctaaaggcatttgcgacgttatccggctcatcgcttcttcttctgtcagggaattccgctccatcagccgtttgagctgaatgtctgccggtacggtgacgacgagcactttgccgacaagataatcaagcccgctttcatacaaaagcggtatatccaaaacgacgaactgctcttttctcgcaatggcttcatcccgctgtttcagcatttccgcacgcactgccggatgaacgatctgattcagcttcagacgcttctgttcgtcagtgaaaacgatagaaccgagtttttttctgtcaatatcgccattttccagcaggatgtcttttccgaatgcttccacaatttgtccgtaagccggcattcctttttccaccgcctgtttcgcgatgacatccgcatcaatgactgttatttttttgtcgatcagcatacgcgctaccgtgcttttgccgcttgcgatgcctcccgttaaaccgatgaccaagctcaaaaagcccactccttcttacattttccaaatcccgatgataatcagcaggactcccggcaaaaatgtcattttatctatccaattccaccttgaaagcaaatgccccgcgtttatgccgagtgaaacaaacagcgagctcatcaccccgacagtcacgctcatcataaccggagaaaagccgagaatggccgctcccagcccggcgccaaacgcgtcaatggataaggcgataccgagcagaagcgcctcgactccgttaatggttccggattgatcaatatcggcgctggtcggttttttcaaaatatgaatgacgatgccgagcgatttcacttcaagattaagcagcgttttttcatgcaataagtaatccggctctttagccggtttaaaaaattgccagatgacccatgcccctattccgattaagatcagcccgcccagtttctccgtgacggatacaggaaaaatctttgtcagaaaatggccgatcagcatggatataaacatcacagaggctgaacagcaggcgatcacggcaatcgctttgaacgggattttcatttttctcaaaccgtacgtaaacccgactgaaaaactgtccaagctgacagcaaaagccaaaagcagcaaagaaacaatctccatatccgtttctccctttctcttgatcggcaattgtgacatatgcctattgggtgaatcacaatatatatatggagaaaggtcatcaactgtgttagaaaaaagtcattctgctgccgcctgcttgaacagcttcagtttatgattttttttggcagcgggcgcaaaaatgagtgcccctcccgccgaccacgattttagaaatcatcgtgccgcacgttttgcacggttcatcctttttgccgtagacgtaatgtttgagctgaaacattccgatctccccttgagaattgatataagaccggacggtgctcccgcccgcgtcaatcgcttcctgaagggtgtctttaatttctgtatgaagcgtttttatctgcccgtccgacagactgttcgcttttgtttcaggatgaatacgcgcccggaataaagcttcatcgacataaatattgccgaggccgacgaccgctttttggtcgagcagggcggtttttaccgcgcggttcgtttttgcaagccgctcttttaaataagcggcggtaaatgcttcatcatcgggttcgggcccgagctgtgaaagcggtaatgcattccgttcctctcccggcgcaaacaaatgcatcgtgccgaatttccggacatcccggtagcggagctgtgttccgtccgtcatgtgaaacacgacgtgcacatgtttatcgtcaggctcatcggcctgatgaagaccgtatttcccctccatacgcaggtgtgacaccatgacataatgatccaaatggaaaagcaaaaactttccccttcttccgatggatcggatcgtttctcctgcaatctgccgcgcgaattcctccggctcggcgggttttttgatgatattcggccatctgatatccgccgattcaatcgttttccccttcacaagaccggtcagagtgcgccggaccgtttcaacttctggtaattccggcacaatcatcacttcctttttttctgtttattttgcatcgtaccaagacggccctgaagcataatccgccttcagcggcacgtctaatgccaaagcatgctccatcacttcaggaaccagcttctctaatatttcaatttcttccttaggcgcttcaaaaattaattcatcgtgcacctgaagcaacagtcgcgccttcaggtttttttctttcagctcagctgccatgtcaatcatggcttttttaataatatcggcggcgcttccctgaatcggcgtattcatggccgtccgttccgcaaagctccgcaggttgaagttgcggctggtcagctcagggatatagcggcggcgctgcataagtgtcgtcacatatcctttttgtttcgcttcctgcaccgattcttccatatacgccttgacgcccgggaagctctccaaatagcggtcaataaaagcgcccgcttctttccgggtgatgccgaggttttgcgacagcccgtaatcactgatgccgtaaacgatgccgaaattgacggcctttgcctggcggcgcatcgcttgtgtcacttcatcttcactgacatgaaacacgtccatggcggtttttgtgtgaatgtccatatcattcgtaaacgcttcgatcagattttcatcttttgaaatatgcgcaagcacccttaattcaatttgtgaataatcggcggcgaaaataagccagtccggttcggacggtacgaaagcctgacggattttccgcccttcctccagccggatcggaatattctgcaggttcggatccgttgagctgaggcgtccggtttgagtcaatgcctgattgaatcgtgtatgcaccttatgagaacccttgcgcgtgactttcagcagcccttcaatataagtcgattggagtttgccgatttgtctgtattgcagaatgtacgcgacgatatcatgtttgtctgcgagcttctcaagcacatcagctgaagtggaatagcctgtttttgttttctttactggcggcaggccgagtttttcaaacagaatgacgccgagctgttttggtgaattgatgttaaacggctcaccggcgatgtcatggattttttcttcatattctttcagttttgccttgagctcttctcccattcgcttcagtctttccacatccactttgacgcccattgattccatttctccgagaattagcgcaagcgggagttcaagatcttcataaagctcaagctgattattttcttccaaagcgtcaagcagtttgtcacggaggctgttaacggcagacgctttccgcgcgagatgatcggcaagctctttttcagcgggaacggcgcgttttgcgccttttccgtataccgcttcatcttttgaaacgatattcagcccgtattctttcgctacgctcgcgacatcgtcgtacgaattgcccgggtttataatgtaggcagcaagaagcgcgtcaaattccgttcccttcagctcaattccctgccagcgcaaagcgacgacggaacgtttgctgtcgaacacccactttttcatcgattcatcttcagcccaagatttaaaagcttcagactgaatggcgatttctttcggaatataataaagacctgtttcattcacgatggaaaagccgaggatcggttcttcgtgatagttatcaccgatttgttcgacgaccaaagcggacggcgaaacgagcatatcttcggtgatttcttctgctgtttcgacattgatgtcttcaaaattttcttccgccgtttccccgctttcttcaccgagccgctcaagaagcgtattaaaaccgaggtctttaaaaatggcaacaacttgttcacggtcaaacccttggtaatctaaatcttcgggcttgacttcaatcggcgcatttgtcataatcgtcgccagctctttgctcatcagggcttgttccttatattcttcaagcttttcttttaatttttttccgctgacttcatcaatggaatcaagcagtttctcaaccgaatggaactgctttaagagcttaatcgcggttttttctccgacgccggggacgcccggtatgttatcggatgaatctcccattaatcccttcatatcaatgatttgcaaaggagtcagaccgtacttttcccgcacgtgctccggcgtgtaatcttctacgtcggtaatgccttttctcgtaatggcaacggtcgttttcccggttgcaagctgggttaagtccttgtcccccgaaacgaccttcacttcaaagccgtctttttcagcagatacggcaagcgtgccgataatatcgtccgcttcatattcaggaagctcgtagcggctgatgttgtaggcatcgaggagctcgcggatgaacggcatctgttctgaaagctccggcggcgttttttgtcttccgcctttatattctttaaacgtgctgtggcggaaagtggtttttcccgcatcaaaagccaccagcatatgggtcggtttttcatcttccagcattttcattaaaatcatcgcaaacccgtatacggcatttgtatgaatgcctttttcattgcttaaaagcggcaatgcaaaaaacgcccggtacgccagactgtttccgtcgacaagcactaatttttttcgttccgtcattcaatatcctcctaagagcaaaagctcgtcattcctctgttttttaatctcacagcttctcttattttaacaaagttcaatttgaaaggaaaatgagcggaccccgtgaaaacgcaaaaaaggacgggaacaagaaaacgcgttcccgccgtcaaaattggctccttggatgaaggggttctgttatatcctaacaagataggtttaacaggtcatgaagaaattgttaatcctttgtaaagctgatcacgctgccggcggccgcttcagcgtcacagtgaacacagttccctgtccaggctcgcttgtgacctcgattttaccttcatgggcttctattaagtgcttcacaatggcgaggccgaggccggttcctcccgagttgcggcttctgtctttatccacgcggtagaatctctcaaatatccgcgggatctcttctttctgaatgccgattcccgtatcggacactttgatatcgacaacggtttctttcacatgtaccgaaatccccaccgtccctttttcaggcgtgtaggtcagggcattgttcgccagattcaaaaatacctgcttcagcctgtgcgcatcacccgtcacaaaaatcggctcttccgggagatcgagctgaaagctgatgcctttttcctcagccttatgctgcaaaagcgcctcaatttcatgcagaatttttgcagcatcaaaggactctacgcgcatcgtaaagttttgctgctccatcttggataaatccaataaatcctgcacgagagattggagccgctcactttctttcagaatgatagacagaaagtctgaaagcgccttttcgtctttcatcgctccgtctaacagtgtttccgtaaatcctttaatcgaggtgatcggtgttttcagttcatgggagacattggcgacgaagtcctttctcatctgctccaattttttaatttccgtcatatcgtgaaaaacgaggacgatgcccttccattcatcatcagggcccatgatcggaacgccgtcaacttcaaagtagcgccgctcaatgttgatgggaagtctgagcagctggcattttttcgtctccgtcataaaaatgtcttcgacaagccgaatgatctcctcatgttcaaacgcatcgtggtaaaggcgccgaagcagacgttcaggctttgtatgaaactgcttcgtgtatgaccggttcacgagattgataaaacctctcccgtctattaaaatcaaaccggatccgatattttcaatgacggttaacagacgatcgcgctgcatatcctgcgttcttgtcatttccattaaatcgaccgccaggctgttcatcgcacgcccgagacggtccgaccgccttgcgtaaccgctgtaggagcgggcgtcgtaattccctttggacagctccgtcgccacctttgtcgcggcgtcgattgattttttgtaacgcgacgtcatgtttgtataaaagaaaacgataatgataaaagcggtacaaagacttgctgccagcatgccccacatttctccggtaacgcttgaaccgccgttgatatccgaggaaacgagtacataccccgcaattttccctgcgtcattttttacggcagtgccgcggatgactctgcttttcgactgtacggcttcctcgcttttattgtgagaaatgaactcctttacggctgaatcatcagcacgactgccggaatgatatacggcgtcacccttctcgttgagcaaggagacgtttataccgagggtgcggccggcgtcacggattaccgtttcattgcttttattgccgattcggccggtgtcaagaaggcccgctatgtataccgattcctttttcagctgatccgccgttctttcttcagcggatgaagaaataagctgctgtaaaaaaaggccgagaacactgaaaaccaatatgatacatacaacgagtaaagcgaacagacgcacacggactttattcattcatttttggctcctccagtttataccccaaacctctgattgttttaatatagatgggttttttggtatttgattcgattttgtcgcgcagatggctgatatgaacgtcaacaatccgggtatccccggcaaaatcatagttccagaccgcgctcagcagaagatctctcgtcagcactcttcccttgtgttttcccaaatacagaagcagttcaaattctttaggcgtcaattccagctgttctgacttgaagtacgcttcgtaatgctccggaagaattttcagctcgccgatgaggatctgcccgtccttttcctcttctctgccttgtgacagcgaagaaatgtcagcccttcttaaaatggctttcacccgcgcagtgacttcccgcggactgaacggctttgtcatgtaatcatccgctccgagctccagtcccagcaccttatcaaattcctcatcttttgctgtcagcatcaagatcggaaccatcattttctgctgtctgagctgtttacagacgtcgattccgtccactttcggcagcatgacatccagtacgattaaatccggattttcattctctgccagctccagagcctcttcgccgtctgatgcggttatgacatcatagccggaccgttccagattatactgtaaaagagtaacgatagattgttcatcatctacaactaaaatttttttgttcatgctgcgccctccgctgtctattttccccgacatccaattttctctattttatgtgctgcatatcactttatgatttcattttatccaatactgcccgttcagacaattcgcctttttgatcattttcagagaaaggatcgctcagggaaaaagaaaacgctttcattaattgtaaaaagaggaaggcttctgattcggaagccttcccttttttcttatgacaatactttcatcacgtttttgacagattcaactgatttactcagctgcgctttttcatagtctgtcagttcaagctcgatgatttgctccaggccgtttcctccgataatcgtcggtacgcctaagtaaatgccttcatgaccgtattcgccttctaagtaagcgatggtcggaagcacgcggcgctgatctttcaaaatggcttctaccatttcagtcagtgatgcagcaggcgcgtagtaggcgcttccgtttccgagaaggttgacgatttccccgccgccttttcttgtgcgttctacaatcgcatcaagacggtctttcgggataagcgtttcaagcggaatgccgcccgcataggaataacggacgagaggaaccatgtcgtcaccgtgtccgccaagaacaaaaccggtcacatcttttacagacaggtttaattcttcagcgacgaatgttctgaatcgcgcagtgtcaagcactccggattgtccgatgacgcgttctttcgggaagcctgattctttgtacaccgcatatgtcatcgcatcaacagggtttgtcaatacaacgataatgcagtcaggagaatatttcacgatctcacgtgtgacgcttctcatgattttttcgtttgtagatacgagatcatcacggctcatgcctggttttctcgcaattccggctgtgatgacgacgatatcagaaccggctgtgtcctcgtagttggacgtgcctgtgattttcgcgtcaaatccttgaaccggacttgcttcgagcatgtctagcgcttttccttttgtcgggttttctaattgcggaatatcaacgagcacaacgtccgcaagctctttttgagctgtaagaaaggctgttgtcgctcccgtaaatcctgctccgataacagaaactttactgcgtgtttttcccatgattctcttctccttttttggcttcattagaagtctgctttaggttcagtccatgtttttgatgagctcttcaccgaactctgaacatttcacttcagttgcaccgtccattaatctagcaaaatcgtacgttactacttttgaagcaatcgttttttccatagatttaatgatcaagtcagcagcctcattccagttcaggtgttcaagaagaagcactcctgaaaggatgacggatgacgggttgaccttgtcaaggccggcatatttaggagccgttccgtgagtcgcttcgaaaatcgcatgccctgtttcatagttgatgttcgctcccggcgcgattccgattccgcctacctgagcggcaagcgcatcagagatatagtctccgtttaagttcattgtcgccacgacgtcgaattcgctcggacgggtcaagatctgctgaaggaaaatatcagcgatgctgtctttgacgatgatttttcctgccgcttccgcttcgctctgcgctttatcagccgcttcttttccgtctttttcgacaatgcggtcatattcagcccaagtgaatactttatctccgtattctctttcggcaagctcgtagccccagtttttaaatgccccttcagtgaacttcataatgtttcctttgtggacaagcgtgacagacttacggccgttttcgatcgcatactcaatggcagctctgactaagcggcttgtgccttcttcagaaacaggcttgatcccgattcctgacgtttcagggaaacggattttgttaacgcccatttcattttgcaggaagctgatcagcttttcaacttcttcagaacctttcgcatactcaattccggcgtaaatatcttccgtattctcgcggaaaatgaccatatccgtatcttcaggacgtttgaccggagaaggcactcccgtgaaatatctgacagggcgcaggcacgtaaacaaatcaagctcctgtctcagcgccacgttcagagaacggataccgccgccgaccggcgtcgtcagaggacctttgatggcgatgaagtactctctgatgtcttccagtgtttcggcaggaagccactcacctgttttattataagccttttcaccggcataaacttctttccacgtgatttttttctcgcctttatatgctttttcaacagcggcttccaatactttagaagcggcattccaaatatcagggcctgtgccgtcgccttcaataaacgggataatcggattatttggtacgtttaatactccattagagactgtaattttttcaccttgtgacacaatattacctcccagtatgtaattcatatttagaaaacattttatttttcttgtataaaaaataaaatgacttttctcaagattctatcaaaattgtaaaccaatccgggcttgattaacaagaggctaacgacatgaaaatcaccagcctcccgtttgatcaggctctttcatcaagcggaacaaaagtctgcttatccggacccgtgtaatcagcgcgcgggcggatgaggcggttgttatcgtattgttcaagaatatgggcgatccatcctgacattctgctgaccgcaaagatcggcgtgaacagatcgtgatcaatgccgagactgtggtagacagatgcggaatagaaatcaacgttaggcggaagttttttctccgacgtcacgatttcttcgacacggattgacatctcgtaccatttgctttcacccgtcagattcgtcaggcgtttgctcatttcttttaagtgtttggcgcgcgggtctccatgcttatacacacggtgtccgaagcccattactttttcctttttctccattttgctgcggatataaggctcggcgttttccacttcgccgatttctgtcagcattttcatgacggcttcattggctccgccgtgaagcggtccttttaaagcgccgattgcggcagtgatgcctgagtaaatatcagataaggtggcgacacatactctcgccgtaaatgttgatgcattcagctcatgatccgcatgaagaatgagcgctttgttaaacgcttccacttcgatcggagaaggctcttcaccgtttaaggtgtaaaggaagttctccgcgattccgtactcttccttcggttcaacaggatcaagtcctttgcggattcttgagaaagcggcgacaatgcccggcactttcgcctgcagacggatggcttttctgtagttcgcttccggattcatgacatcggcttcactgtcagtcagaccgagtaatgaaatcgccgtccggagcgcagccattggatgtacgttattgaggggataggatttgaagtgctcaatgatttcttgtggaacggcagcttctttcgcaagctgttttttcagttcagcaagttccgttttattcggcaggcgcagatgccacagcaaataaatgatttcttcaaaacttgcattctctgtcaagtcgtcaatatcgtaccctacatatgtaagggtatcgtcgataatagagcttacagatgatgttgttgctacaaccccttcaagaccgcgtgttgctgtcatattcaacctctccttttcaatcaaaattcccctttaaagagtatataaaacatacggcttacttaaaatgagtcatgcaaacaatccctttcccctttaagaaaatgcttacatttcactggttgcggttacataaccggtatgcttatagaggaacataacaaattcttataagcttatttaagtttaagcctattcttattataaacaataatctgattaatttgtagacttttaactaaaaatgttttaaaagccctatatatcaaggcttggcgttgataaatttaatcgcttgctttcagatgctttgtaaaaccatgtattctcatgttttcatttggggggagctttggggaaactttaaaaggacaggcgcaacaacttcaccgcaaatccctccttctttaccggagaaggggggattttgtttactcgactgaatcaatgttcggatcagcttcggaaatccatgtcttggttttagttggctccccgtacatggactggaatcgtttgactgcatttgcgctgttgtcggcccgtaaatatcctcatcaaaccgttcatcaattgaaactgactcatttactgatgtaggtgaagttaaataaatgcagaaaaaccctcctcatctcgagaagggctcgatttctgcttcttttttctaaatcagtccgaagaaaaaactgatgccgctcaactttttaatcgaagggcttcgggttctccaactatttgcccctatgcttttcttttgctttttgttttctgattaaatatttttgttcctttattttttctctttgttttctgttcagttgttttttcttttcttttcttgcttcaagctcctgttttatcgctttttgcgccttagttgatatcccgatatttttcatctctttagaagcttgccgttgtaatctttttgggtttaacttcttagattttgctttaacacaaacccctgtttgttcagtgcgggagagagtctgtaaaagttgattatgaacaaaatgcatgatttctgaatccttgggctcttttccaaacaaatgacgaactgctcttaatttcccatcattcacaacttcaatgactcctacccaaaactgaccatcgtagtaaaccgttaatttcataacgattccctcctcctaaatttactgaagaatgatggacatcccgaggaggggaaggttactgacattttaaataatgcatccggactaccaaccgaattgtgttttttcattctcattataaatttaacaaactttcaaattgaaggaaagggtctccgcttattttaacaacacttcaagttttgatttggttcaagtgcataaattccatcagcttttaatccattcatcaattggaaccgccttactgcatccgctgtcatcgcacaatatgcgccggcgattccgaagttctttgttacatggtaagccacttcattcctcggaataatgcaaatggcatttgtctgaactacaaaatgccctgcaaactcttattttcacccgcaaaaaaaagcagctttacgccgcttttttactttatgaagtgaatattttaacgatttgcatggccaagtaggcgattccggcgccgattaacgggccgacggcgacgcctccgaaaagcgcgacggcaagtatcgtgccgatgaccagcgccgttgtaatatgagggtcgttttccaataaggtgagaccgtttttggcgattaaggcaaccgcgatcccggcaccgagagcgatccacgcataatatgatttcatcgcttctccgagctgtttaaaaccgatatcacctgtggcaatcggcactaaaacggcgattgtaatgacggtgacccccagttgatgccttttgactgaataaccggaaatagtttctgatcaagaccgacagcttttatcacaatgagaaagccgacggcaaaaagcaatgactgatttttggctaccaatgcgatggccagcaataatagtaaaaataaattcgcctgtgtaaacatcctgaaagcaccctctttcatcatatctgtaatcatatccttttttttgacgaataaactaatgtaataggacgtgccgaccgagaggaggatcgatgtgaatccgcactatgcaactgtttttttccgcgcgctgtttgtactcgctgcggccggcggcgctttagcggccggttacgcctcatttccgttaacttatccgtttctgatcgcccttattctgtcatcagcgatcattcccgttgttgactggctggacaaactgacggggctgccccggtcagtcaatacagtcattgtcctggtcttctttttgcttattcttctcggcgcggcaacatttctcgttgcggaaatcatttcgggaaccgcctatctggccaaaacgctccctccccatatcagcgcctttatgacgtattgcgaagagctgttcacttcccgcattcagccattgtaccacgagctgaccgtcctatttaacgggctggaaaccaatcagcaggcttccatcgtgacgcatattcagaccctcggtgatacagccgctaaaaatgcggggctcatgctttcacatcttttggagctggtgccgaaatggattgccttccttcccaatacagctgccgtcttcattttcgcaatgctggcgactttttttatgacaaaggactggcataagctgaaggcgctgctttattccatttttccggaacgggtttcggcaaacgccaaggccgtatcgggagagctgaaaaaagcgatggcaggtttcattaaggcgcaggccgtgctcatacttttcacgatgatcattgtctttatcggactttttcttttagggattgagcatgcggcaaccatcgccttttttatcggcctggttgatctgctcccgtatctcggcgccgggtcggtctttgttccctggattatgtatttggccattgccggtcagcttcctcaagcgatcggtctcggtgttttatatattgtggttctcattcagcgccagctgacggagccgaaaattttaagcaagtcaatcggacttgatccgcttgcgaccttaatcgccctgtttgccggctttaaattgttcggaattttaggactggctgccgggcccgcgctgctcgttttcattcaggcctttatcacaacgggcgctctaaaagaaatatgggcctatattactgttcaatccaaataaaaacagcagccctgtaagaaggctgccgttttttatttgataatgatccgcttgttttttgacatccctctcagccatttgaacaaaaacggcttcatgcggttccgagtgaacggaatcagaagacaggcccctgcaatatcggacagaaaacccggaagcatcaaaagcaggcctccgaaaaagacgcatattccgtcaagaagcgcttcccccggcattttgccgtgctgcaggtcgcgcatcacccgatgatacacatcggttccctgtctttttgccaccaaagcgcctaacacgcctgtcaaaatgatgagaaggaaggtcggaaaaataccgagccattttcccgccagcagaaacaaaccgatttcaattgccggacatacgataaacagtaagaataacactctcatttttctgccctcctgcccttctaaaagcgcgtcaccgcccgcatgggaataggaaaatcaacctaaagacaaaagagaagggagaacccccctctcttttttaaagctgtttaaagaacgcttgcgcggccttcatacacagcgccgcgggcagcgtcaactgtgataacctgtccttctgttaaaactgaagttgcgttctcaaggccgacgataaccggaatgcccaagcttaaaccgacaacggctgcatggcttgtcagaccgccttcttcagtgatgagcgctgatgctttttcaagtgaagcgatcatgtcgcggtcagtgcttgaagcaaccaatactgcgccgtctgtcattttttgttcagcttctttcgcattttttgcaacaacgaccggaccgaatgcagatttgcgtccgatgccttgccctttcgcgataatgctgccgacagtgtggactttcatcagattcgtcgtgcctgattcaccgacagaacctgctgtaatgacaatcagatcaccgcgtttcacgatgccgctgtcaagtgatttttgaaccgcgtcttcaagcatttcatctgtagaattcgcgttttggccgcttgacgggaatacaccgaatacaaggccgagtttgcgtgatacagactcattaaccgtaacggctacaatcggagcctgcggacggtatttcgcgatcatacgcgccgtatggccgctttctgtaggcgtcacgatagctgccgcactcagattgatcgccgtgtgcgcaactgattggccgatcgcatcagtaatcgtcatgccgacctgatctctgcgtttagacagaatttctttatagttcagagattcttccgtgcgtgtggcgatgttaaacattgtttgaaccgcctcaacaggatattgtcccgcagccgtctcaccggaaagcatgatcgcatctgtgccgtcgaaaatggcgttggcaacgtcacttgcttcagcacgtgtcggacgagggttgcgctgcatgctgtctagcatttgtgtcgcagtaataaccggtttgcccagcgcgttgcattttttgatcatttctttttgcacgagcggcacttcttcggccggaatctctacgccgaggtctccgcgcgctaccattaggccgtcagatacttccaggatcgcatccaggttgtccacgccttcctggttctcgatcttaggaatgatttgaatgtcagacgcgttatgctcttcaagcagttcgcggatttccaggacatccgtagaacggcgtacaaatgacgcagcgatgaaatcaacgccttgctcgataccgaatatgatgtctttggcgtctttttcagtaattccgggaaggttgacgctgacgccgggaacgtttacgccttttttatttttcagcgtgccgctgtttaagatttttgttttgatttcgtgtttttccggatttgattccagcacttccaatccgattaaaccgtcatccagcaggatgatagaccctgctgacacgtcgtctgccaggccttcataagaaactgagaatttttcaagcgttcccagcacctgtttcgtagaaacgataatttcatttcccgcctgaagctcaagcgcgccgttttccatatcgtgcgtgcggatttccggacctttcgtatcgaggagaatccccacgtttttgccgagctttttgctggcttctctgatgtttttgattcttgcgccgtgctcttcgaaatcaccgtgtgaaaaattcagacgagcaacgttcatacccgcttccatcaattttgtcagcatttctacactttcactggccggaccgattgtacaaacgatttttgtttttttcaactcgttcacttccttctgaaatcttcagcttcttccgccttaaatagacagttcttttgaaagctgatacatgtttggttcaacagtatgttttgattctaaaatttctataatatcatggtctacaagcttgttgttttgtatacctacgcagcgtccgccttttcctttaagcagaagctcaaccgcgtaagcgccgaggcggcttgcaagaacccggtcagaagcgcttggagatccgccgcgctggatgtgccctaaaacggatacccgtgtttcaaggttcgtttcttcttcgatgcgttttccgaattcaaccccgctgcctaccccttctgcaacgatgatgatactgtgttttttgccgcggtcgtgccctctcttcaaacggccgataatttcctccatatcgtagtccgcttcaggaattaagattgattccgctccgcctgcaagacctgcccataaagcaatgtcgcccgcatggcgccccatcacttcaataacgtatgtacgctcatgagacgtagcggtgtcacggattttatcaatcgcatcaattacggtgtttaacgccgtatcaaatccgatcgtaaaatcagttcccgggatgtcattatctatcgtacccggtacacctacacacggaaacccgtgttccgttaattttttcgcacccatgtatgaaccgtctccgccgatgacgacaagaccttcaatgccgagtttctttaaattttcgattcctttttcacggccttcaactgttttgaattcaggacatctggccgtatacagctttgttccgccgcggtggatgatgtcaccgaccgaacccagctccagtttttctatttttccgctgattaatcctgaataaccgttataaattccgtacacttcgacgtcgtggtagatagctttccgcacaaccgcgcgcaccgcagcgttcatacccggggaatccccgccgctcgttaaaactcctatacgcttcatttcctattcacctcagcaactatatatgttaaacatatcatgatcattgccctaaaacaatgaaaagggacgcctgagctcccatgaaaccttacctattatacaattaaataaattgtttttaaataaaatttaaggaatatcacaaaaatcacaaaaaataaacgtgagccataggcttcacgtctattcagtttaccccgatatattgatcctcaaccgaaactttcccgattgctttatatttttcatagcgctgtgagatcaactcttcggcgttcaatcgaagaagagattttaacgtttctttaagaataccgtcaatgtagcccgcctgctgcttgatatcatggtgagctccgcccttcacttctttaatcatatcatcaataattcctaattctaataaatcgggcgcagtaatcttcatggtttcggccgcttttttcgcaaggctggagtctttccacaaaatggacgcggctccttcaggagaaataacggaatacgtcgagttctcaagcatcagcatgcggttgcccacacctaacgcaagcgcgcctccgctgccgccttccccgatgacgatacaaacgacaggcactgtcaggccggccatctcgaacaggttcttggcgatggcttcactttgtccccgttcctccgccgctttacccgggtacgctcctttcgtgtcgatgaagcagataatcgggcggttgaacttatccgcctgcttcatgagacgaagcgctttgcggtagccctcagggtgaggcatcccgaaattgcggacaaggttttctttcgtgtcttttccgcgctgatgtccgatgacggtgaccggcatgccgtgatatttggcgactccgccgacaatcgcagcatcatctccgtatgttctgtctccgtgacactcaaaaaagtcggtaaacaggtattgaatgtaatcaagcgtcgtcggccggtcgggaaggcgtgcgatctgcactctgtcccacggcttcagatttttataaatctcatcctggagcttgctgagccggtcttcaagccttgcgatttcagcgcttaaatccatctccgaatcttgggtgaattttttcagttcggcaattttcgtctgcagttcaatcaccggtttttcaaattctaatcttgcagccactcatgctcacctcctgtttggtgcatgtccagcagaaatgcgagtttctctttcatgtcgtttcggtgaatcaccgcatcaagctggccgtgctttaataaaaattccgccgtctggaaatcttccggcagtttttccccgatcgtctgttcaataatacgtcttcctgcaaatccgatcaaggcgcccggttcagcgaaattataatcaccgagagacgcgaaactggccgatacgccgcctgtcgtcgggtgggtcatgacagaaataatcagtccctgctcctcactgaacagttttaatgcagagcttgtctttgccatttgcataagacttaagaccccttcctgcatacgtgcgccgccggaagcggtaaagatgataaacgggactttttcctcttttgctttttcaattgcaagcgtgattttttcgccgacaaccgaacccatgctgcccattcggaatgttgaatccatgatcgcgatcacggcagggaatccgctgatggttccttttccggtaaccaccgcttcattcagcgatgttttctcacggtctttttcgattttttctaagtattccgggaaaccgagcgggttttcagatatcattccctggttgaattcttcgaatgaatcttcatccaggaggctttcaatgcgctgctttgcattcatcgggaaatggtgcccgcagttcatgcagacgcgcaggtttttatctaactcttttgtgagcatgatttttttacatttggggcactttgtcataatgccttccggaacatcatgttttgcctgctcagacggcacggaagcatattttttcttttttgtgaatatatcctttaacaaatgattacctcccttttgtgaagggttctcttcactgcatgtcttccgattagatagacttaataataactttaccgaaactattgtactttttttgtcaaacggtgtcatcctccattcgacattttttgctgcaaaacagacggaaacggacggatttcataccgtaaaaagcgttgttcagccttatctgtcagcgttttcaaaagaaataaggattctgctgaaatttttttaagacctgcccttaaaaaaatgccagcagtccgtatattgaacagcagcgcgttgttttttccaacgcgctgccatttcatttttgtgttattattccccgatgactgtgagctgtcttgttttttcagccacttcttcaggatcgaccgtaattctggcgacgcccgtttccatcgctgctttcgcaacagctttcgcaacggcaggagccacgcgtttgtcaaacggagccgggatgacataatcagcgcttaattcttcctctgaaacaagggaagcaatcgcttcaaccgcagcaattttcatttcttcgttgatgtgagtcgcgcgaacgtcaagcgccccgcggaaaattccagggaatgccagcacgttgttaacctggttcgggaaatcagaacggcctgttccgattacgctagcgccggctgcgcgcgcgtcttcaggcatgatttccggattcgggttggccattgcgaagataatcggatctttcgccatgctctccaccatttctttcgtcagcgcgccttcgactgatacgccgataaagacgtctgcatctttaatgacatcctgcagcgagccatcgttgcggtcttggtttgtaaacttggccacttcgtttttcaccgcgttcatgccggccggacgcccttcgtaaatcgctcctttagagtcgcacatcacgatgtcgcgtacgccgaaatggtaaagaagcttaatgatcgcgatgcctgccgctcccgctccgtttgccacaactttaatggatgacatggattttcctgataatttcagcgcgtttacaagtccggcaacggttacgatggcagtgccgtgctgatcatcgtggaaaaccggaatgtttgtttcttttttcaggcgctcttcgataatgaagcagttcggcgccgcaatatcttcaaggttgacacctccgaatgtcggttcaagcagcttcacagtgtcaatgattttgtccacatcgtttgtgtcaagcgcgatcgggaatgcatccacgcccgcgaaacttttaaacagcaccgctttcccttccatgaccggaagtgaagcttcaggcccgatattaccgagaccgagaacggctgatccgtctgttacgactgctaccatgttccccttcattgtataatcatatactttatttttatcgtcataaatctctttacaaggctcagctactccgggagagtaggcaaggcttaagtcgtccgcgtttctgacttctacctttgcttttgattccagctttccttgatttactttgtgtaaatgtaacgcttcttctcttaatgacattctaaacactccttttaagtactttgttacatattctgccgcatagactggtacaatcgctggaggtgaaaaatttcagaatctttaaataagatagcacaattgtttcaattgtataacaaaacgattattgttaccactattttaacacgacgttttcgcggcccagcagctcttttaaacggtataacgcctgatggtccgcctcaatatgaaaagtatccggcagcctgatcgtctgcttgtctttttcataatatagataaacgccggtttcccctttatgctccagtaaaatacgcttcatcttttccaaaaactcctgattgtgccggctgccttcgattttgatgtaaacagacggcgctctgtctgcctccgtctgttcaagaagagaggcggatgacatgatgaattgtgtcttctcctgacgctcttccatttttccggcggcgaataaaagcgcgccttcttttaacagcggagacagccttctatattggtcaggaaacacgacggcttccatttctcccgtttcatcgcttaatgtgagaaacgccatatgctgacctgtctttgtccgaatcgttttaatgcccgcgagcaaagcgccgattgacagctgtcccttcggcatctgccgcgctgctgtgatcgtttgcgccccccgttttttcaggagatccctgaaagcagacaaaggatggcttgagaaataaacaccgagagcttctttttcgaaccgaagcttgtccacgagcggaaattcctcagcctctacatattttggcttaatggaaaacgattcttccaaaaacaatcccatttggtcatcgtctgcacgaaaaagttcagcgtgctctaaagccacatcaacggaggccagcaaggcggcgcgattttgattgaattcgtccatggcgccagaaaatataagggcttcgatggttttccgattcacgctttttgcaggtacgcgaaagcagaaatcgaaaagatcctcgaacggtttatgtgttcttgctttataaatatctttcactgccgagacgcctacgtttttaacggcccgcaaactgtatctgacggctccgttttccggcgcaaacggaaaaccgcttttgtttattgacggcggaaggacttgaatcccgctccccttcgcttcatgcagatattgcgatattttgtcctcattgccgatgacgctcgtcaacagcccgcacataaaatatagcggataatgcgcctttaaataggcgagctgatagccgatcatgctgtatgcgacagcatggcttctgttgaatccgtagttagcgaattttacaatcagatcgtagacctcgtttgcagtgactacagaatactccttttttaagcacccttcaacaaaatggcttcgctctctgtccagaatgtccttttgctttttgctgacagcccgtctgagcagatccgcttcacctaatgaaaaccctgccatgcgcgaggcgatcatcattatctgttcttgatagacgatgacgccgtaagtgtcactgagaatatttcttacgtcctcgtgcggcacttccacacgcgcccgtccgtgcttccgatcgataaataacggaatattttccatcggtcccggcctgtaaagcgcgttaaccgcgacaatgtcttccagtcttgacggcttcaggcgcttcagcacgtttctcattcctgatgattccagctggaaaatacccgtcgtatcaccgtttgacaatagcgagaacgttttttcatcctgataagaaatctcggaaaaatcaattttcgtattcgtctctttttcaatcatcgttttaatggattcaataagcgtcaggttgcgcaaacctaaaaagtccattttcaaaagaccgagatcttccaggtgatccatcgcatactgcgttaaatacacgccgtcatgcccttcttgaagagggacaacttccgaaagcggctctttactgagaacgaccccggccgcgtgtgttgacgtgtgtctcggaagaccttcgattttccttgcgatctgaaacactttatgaagaacggcggattcggacagccgcctgttcagctgagcggactgccgcctcgcctcctcaagcgtcattcccggtttcgacgggatcaggcgggcaagctggtcggcttctttcgggctgattccgaacactctcccggtatcccttaacgccgcctttgcggccaatgtcccgaaggtgataatctgggcgacgtgcatggccccgtacttattttgtacatactgaatgacctcatcccttctcgtatcagggaaatcgatatcaatatccggcatgctgatccgctcgggattaagaaatctctcaaacagcagagaatgtttaagcggatccacgtcggtaatgaaaagcgagtaagcgacaagcgagcctgccgcggacccccttcccgggcctgtcacaatgcccttttcatgcgcgtacttcataaagtcccatacgatgagaaaataatcactgaatttcatgcgcctgatgacgtccagctcatattcaagccggcggacagcccgctcatcaggagtgccgaaacggagacgcagcccctcatgacagatctccgccaaatagtcatcggctgatttgccgtccggcgccggaaaagacggaagctgtgtctgtccgaggcttacatcgacccggcattgccgggcgatacgggcggccgcttcaatcgcttccggatgccgcgtgtaaagctctgccatttcttcaggcgtcctcaagtataagtccggcagattcccgctctgatcctcccatttctctccggctttaatagcgcacagacagcggtacgcatcttgatcttctttcttgatatagcggacatctcccgcagcgcagacagcgatttccgtctcggctgacaggcggagaatctcttctgataacgtctcatgtcctttaaacggctggtaccctaaataaaaacggccgtctccgaacagctcccggaatccttcggcagcccggaccgcttcttcaaacttcccggcttgaagcaggctttcaatgtacccgttttcaccgggcgtaatggcgatcagcccctcatgatagctcttcatccattttcgcttcatgccgccctttgccatggattgcagcgcacttgagattttcaccaggttctgataaccggtgtttgtctccgctaaaagaatgagcgggtgtgcttcaagctccgtatcgtccgtgtatatagaagccgtcagaccgataatcggcttaattccgtttgatttgcatgctttataaaactcaatggcgccgtacatcacattttcgtccgtcagcgccaatgatgaatatccgagttccttcgcttgtgtaacaagctcttttacagaagcggcgctgtttaacaggctgtagccgctatgtacttgcaggtgaacaaaagacaatgccgccactcctttcccatacgttcattttgtctttctacattataagacgggttttcttaagaaacaaatgttcttttttgactcatcatcatacttgtccgtttcgctcaatatgatagaaaagtgaggtggtgtatatatggatcaggaagccggctttatggcgaatttcatcagcagttattttatcgccctcggtgtgttgctcggcggcgcgctgatcggcggcctcggagcttatttatcaggcgagcctccgctgacggcgatcacaaaattggcgaacaggctgaagatctgggcgcttgtcgcggccatcgggggaacatttgacgcggtatacagtttcgagcgggggctgtttgaaggcaacacgcgcgacatcttcaaacagcttcttttaattatttcagcaatgggcggcgcgcagaccggctggctgattatttcatggctgacccaggagaatatgtcatcatgagaattcccgagtattataaaaaaccgggatggcagcgtttttttgcgggaatgatgtgcggagccatcatcagctggctgttctttctgtttacatacggaacgtttcaggaagaacaggtgacgttaattgaaaagcagcgggagcacgcgcgggatttaaaaaaccaaatctccatctatcagaaagatcttcataaattaaatgaggataataagcaaagacttctcatccaaagtgttgatgtgaagctgattaattgggaaaaatacagaatcgcccagcctgacaagatgaaatttgaggaacaggtgaaagataatatttctgaagtcatcacaaaggatattgaaagcgtgtataaaacaaaggagcttttaaaacggacaattgaaaacaaaatatacaccataaatgagaaggaatttaaagctgaagtaaaggaactgacgatttatacgagattgtctgtcgaaattcatatttcttttgcgacgtaattatgttatttttaaaaattttccatagatctgtcgcttttttctccgcttttttataaactgtagatgagacattttcaacgattctgaagggaggaagggaaaatggaggtttttagtgaacgccgcttggcaaaagatcatgcagcccgaatcagacaaggctattccgcatatgcagaaacagacacactcgcttccctcataaaaaaagaactccaaatctgtaatctccgcgtctacgaagacctgactgaattcggctgctggttcatccccgtgacagatgaacactaagaaagagggtctcccctctacttgtgttcgttacatacctcttccagatcagcaagaatctgatcggtttcatcccagctgaagatggatgcgccggccgcaagcggatgtccgccgccattgtatttccgggcaattccgttgatgaccggaccttttgaacggaaccggactctgatttgatcgtcttcttctacgaaaaacacccaagcgcggatacccgaaatatttccgagtgttccgacaagctgcgacgcttcagaagcggtggttccatatgtctccaaaatgtcttttttaatgaaaacggaagcgacgccgttttcagacagtgacacattttgataaataaagccgttaagcttcaccacatttaattttgtttcatacaattgattgaacagctctgacgatgaaaatgggaactcaatgagctctcccgcgtattttaatgtcttttttgtggtgttcgggaataagaagcgccccgtatcaccgacgataccagcgtagatcagctcagctgctttcgtattcagtttccagccgtgctgctttccttccaggtacagctcatagatcatttcgcttacggagcttgcattcgtatcgacccataacagatcgccatacggatcttcatttggatggtggtctattttcatgagctttgcgccggaatggtagcgctgatcgtcgaccctgccttggtttgcggtgtcgcacacgatgacaagagcatctttataggtttcgtcatccacctcatcgagggaatataaaaaagacaaggacggttcaggctgtccgacggcaaaaatatttttttcgggatacgtttcccgcaggatttctgtaaggccgcactgtgaaccgtaggcatccgggtcaggcctcacatgtctatgtaagataatggtgtcatataatgatatggttctgatcagttcggatttcatcgttttctccttttcgtttttattcatttaatcatactctttatccatggaaaaggaaaatctttcagcaacggtataaacggttttgcaaactcatataatggaggatttcatttatgctggtttttgtttttctcatcgggctttctgcctgcttttacgtgtattacaaagtaaaaggaatccagacgaaacgggcgctggagaaggaatgtttttcggctaaatcaagtatggcattaggcgcgctggtgcttttgtacggagtaaaccaaatgattctgttccactccgtcctgaccctggtcatcggcggcgtcttcattttaatcggagcaggcagcgcatgggccgggtataaagcctataagcattatgagcccatccatgcaaaggaagcggagagggaccacgcataatgaatgccaagggacccgggtgtgtcccttaacttctctccatcagctgcaccatgagcatcgcttttgaaacgatgccgctttggcttgacacttccacttccattttcccgaatttccggcccgcctctaaaatgcgcggtttcacttctatgaccgactccatctgtacgggcttcaggaagaaaatcgtaatgctttcaatgaccagctcgccgcgtttgcgggagcgtaaaaatcggctggcggcctgggttaaaatcgttgtaaacaccccgtaagaaatcgtgccgagctgattggtcatttgcggcgtgacttcatattgataaacggccggcgttttgttatcttcctcttctttaaatccccttgaaacaatatcatccagcttttccccgacctgaggctgcttttgaaccatttgaagcgcttttaagacatcctggcggctgatcattccgatcagtttgtgatgcccgtctgtcaccggaagcacttcaattccttcccaaaccatcatttgagccgctgaggcgacagatgtttttccgatcaccgtgacagggtttttggtcattactttttcaatgggaactgaccggtcatgccccgcgatatctttcggcgtgaggattccgtggattttcatctgctgatcgataaccggaaagcggccgtgtccggtttcatagttcttttcgtaccatttctccagtttatccttagggaacagcgtcactgtccgatctgcgggcgtcaaaatatcttccacgagcacaatctctttttttatgagctgatcatagatcgcccggttgatcatcgcggctaccgtaaaggtatcgtagctcgtggagagaatcggaagctcaagcatatcggccagctcgataatgctgtcgtcggtattaaaccctcctgttaccaaaacggccgcgcccgcttcaagcgcctggcggtgggcgttgattcggttcccgacgattaacaggttccccgccgccgtataacgcatcatcgcgtcaagctccatcgccccgatcacaaacttattcaacgttttatgcagacctgcttttccgccgagcacctggccgtcgatcacattgacgacctcagcgtatgtcagcttttcaatattttcttttttcttctgttcaatccggatggtccccacacgttcaatagtggaaacgaatcctttgttttcggcttccttaatggctctgtaagccgttccttcactgactttcatttctttcgcaattcttctgaccgaaattttttcaccgacaggaagcgaatctatgtatgataggatttgttcatgctttgttgccaagcgtttcacctctaaggacagtcttctgcttttattataagggtacgggggattcattcgcaatgagacgcccgaaaaaaggcggcaccacaaaaaagaccttctgaatgcttgattcagaaggtctttgacacatatgtcaggcaagctcaatggtctcgccgaccgccatgactttgccgacgcctccgggcagactttcagcgaaagcgtcagggtcctgttcaatgacggggaatgtattgtaatgaacgggaacgacctgtttcgctctcagccattcagccgcgagtttcgcatcttcaggccccatggtgaagttatcaccgatcggcagaaacgccaggtcaatgtgattcagttccccgatcagtttcatatctgagaacagcgccgtatcgccggcgtggaaaatcgttttgccgtcaatcgttaataaaatcccggccggcatcccggtgtatgtgatggttttgttttcttcatcagtgaccgccgatccgtggaacgcctgtgtcagttttactttgccgaaatcaaattggtgcgccccgccgatatgcatcgggtggacctttaaacctttaaagccgagataaacggccagctcgttcggcgcaatgacgagcgcatcgttttgtttggcgatctgctctgtatctccgacatggtcattgtgtccgtgagtaagcaggatgacatccgctttcacttcttccggtttcaaatttgtcagactgtttccggtcagaaacggatcaaaaataatgttatgggttttcgtttccacttgaatgacagaatgtccgtgataagtcactttcatcgttttcacctcataaaaaattaatatttatcaagttccctttttgacaaacgaaaaaacttacagggattgatgcctgttaatcacattcagcccgcctgttgcttcaatgaccgttccggttacaagatcggaatcttcttcacataaaaacgcgatgattctcgcaatatcctctccggttccggacctgccgatcggcgtcttttctttgccgattttccgtcttgcttcctctatagacgcttctttcatatctcctacaatatcacccgggcagaccatattggctgtaatgcctgattcggcttcttcaatcgcaatggttttcgttaacgaagccaatccgactttagccgctccgaaagcggaacggtgaagccagccgggggcatggtccgctccttgaaaaccgtatgtaataatccggccgaagcgctgctgtctcatgaccgggataaccgctttaaacagatggaaaacggcgcttaaattcccttcaagcatgccataccattcgtcatcggagtaatcggcaagctttttgcgctcaaatatgtacggcccggcattgttaatcagtatgtcaatccttccaaaccgctgaagggctgcatcggcgatccgcatgagatcttctttccgggttacatcgcccttaacgaattgcaatctgtcatggcacccgggataatccgccttcagacaagcgaccgcttcttcgtcctgtctgtaattcactgtgacagaaaagcctttttccagaagcatttcagtcacttttcggcccaatccctttgtaccggcagtgattagagcatgtcgcacattgaataccctccccaggcaacgtagccgcttcaataaaatcaagacgtttctccctctactttactataaacaaacggcaatatcacttttttgcacttcgtccgcacgaaaaaaaagccgtctttacagacagcttaattttctgaaggagcagaggcttcctccatgccgacataaccgctttggtatgcctctgagataagcctggccgtttcttcactttctttttcatcatagatgtaacggtcttgttctttgcgcattccttttacctcccatcttttatagatgtagggtgtctgatatgacgggaaaatatgaaggaaatttcagcaaattaaatgccggcgcaggcttttgcttttacgagcgcctgttctacctgctgaaaacccgttccgccggcgctcattcttttttcaaccgcatgatgcggatcgagcacggtatagatatcttcttcaaagagactgctggcttgaaggaattcttcaaatgccatgtcacttaaatagattcctttttcaatacagctgtacacaagcttgccgaccacttcatgcgcttctctgaacggcatgccttttttagctaaataatcggcaagttccgtcgcgtttgaaaaatcttgttttgtcgcttgtttcatgatgtctttgtttactttcatcgtttcaatcatgcccgtgaaaatctgaaggcttccttcaacggtttttactgtgtcaaacatgccttctttatcctcctgcaggtctttgttgtaagcgagcgggagtcctttcataattgtgaaaagacccatcatatcaccgtatacgcgtccggttttaccgcggatcagctccgccatgtcggggtttttcttctgcggcatcatgctgcttcccgtcgcgtacgtatcatccagttcaatgaatctgaattcctgcgagcaccatagaatgatttcttctgacaaacgtgaaaggtgcatcatcagcatgctgctgccgcttaaaaactcgagaataaaatctctgtcactgactccgtcaagactgttctcgtaaatggagtcaaaaccgagcagctccgccgaatagttacggtctatcggaaacgtagttccggcaagcgccccgcatccgagcggcgatatgttaatccgcttcatagcatcccgaaaacgctctttatcccgttcaagcatccaaaaataagcaagcagatggtgggcgaaagaaatcggctgggcccgctgcaaatgagtgtaccccggcagaatggtctcgacattggcctccgctttttcgatcagcgctttttggaactgttcaatcagcacgatgatatgcgagacatgatctttcaaatatagatgcatgtcagtcgccacctggtcgttccggcttcttccggtatggagtttgccgcctagcggtccgatttcttcaatcagcattttttcaatgttcaaatgaatatcttcataatcaacagagaattcaagcgctccttcctctgctttttgcaggagagtctgcagcccttgacggatggcaccttcttcttcttccgtcagaatgccgcattttttcagcattgccgcatgagcgagagaccctgtaatatcctctttgactaagttttggtcgaatgtgatggatgcgccgaactcatcgacccacttttccggtgttttttgaaaacggcctccccaaagcttcttcatgcttcaatctgctccttctttttcacaatgctgtttacttttgtcggcagcccccaaagctcaatgaaaccgattgccgcgtgatggtcaaacgcatcgtcttttgtatatgtcgcaagtttttcgtcgtagagagaatattccgacttacgtccttctacaatggcatggcctttaaacagcttgacgcgcacaacgccggtgacatgcttttgggtttctttcaggaatgcaagcagcgcgtcttttaacggcgagaaccataaaccgttatagatgatttcagacagtttttgttcaattgccggtttgaaatgggccacttctttcactaaagtcagatcctcaagctctttgtgagccgtaatcaaagtcatggcgcccgggcactcataaacttcacgggacttaatgccgaccaggcggttttccacatggtcaatccggccgatgccgtgttttccggcagtctcgttcagcttgagaattaaatcagcgagcgggtaggttacgccgtcgattgaaaccggaacaccggcttcaaatgcgatttcgatgatttccggaacgtccggcgtgttttcaagagatgctgtcaggtcatatgccccttcaggcggcgccgcccacggatcttctaatataccgcattcattggcgcgtccccataggttctggtcgatggaatacgggctgtcaagattgatcggaatcggtatgccgcggcttgcggcgtattcaatttcttcttcacgcgaccattgccactcacggaccggagcaatgacctccagatcaggatttaatgatttaatggatacttcgaaacgaacctgatcgtttccttttcccgtgcagccgtgcgctacggccaccgcgttttccttttccgccacttccacgagttttttcgcgattaacggacgggatagtgcagatacgagtggatacttgccttcatacattgtatgggcctgcatagaaatgagcgcgtactcccgggcgaattcttctttcgcatcaatcacataggaatttacggcgccaacttccagcgctttttgctgaacgaatgccaaatcctttccttccccaacatctaagcagcaggcaacaacatcgtatccctgttcttgcagccattttatcgctacagaagtatcaagacctcctgagtatgccaatacaacctttttttgttctgccatgttaaaagctccctttgtataaaaattagttttaattaataaaaatgcattttgtatgtatacactgtaacaagtaaattctgttttttcaagccttttataaaaaaaaccccacccaattttttgagcggagcagagcctttttatacatttataaatcttttcggatttcccggagcacatgaggcagttcaggaataatcagtttactcattgcaagctttacggcgcctgaggagccgggcgtgcagaagactgcggtatttcggatcacacccgctgccgctctggacaaaatggcggcggagccgatgtcctccgtatagctcagcatgcggaacagctcgccgaaccccgggagttcttttgaaaacagcggcgtgaccgcttcaattgtgacatccctttcggcaatgcccgtccctccgtttaacagcaccgcatctgtatattcatccatacagccggataaaacggctttctgcaattcatctttttcatcttttacaatgtcataagcgaccgtttcaaatcccgcttctctgatgaaatccatcatgacgcgcccgcttttgtcggtttctttcgttctcgtgtcgctgactgttatcaccttgcagcgcacggctgacggggcttcttgtttatgttcatgcacactcattgcttcacctcatcgtttatgtattaaacatatcgtaacgtttgattctggggcattcaataaaaaagcacaccctaaaggatgtgcttttttcgatcattactgtgcaagacggacaacgtcacgtgcgatcatgacctcttcgtcagtcggaatgatgatgactttgacaggagagtgagggtagctgataaacgcttcctcgccgcgcacgttgttcagcgcaggatcccaatatacacccatgaattctaagccgcgaagcacgcgttctctgacttcaacgctgttttcaccgatacccgcagtgaaaataatcgcgtcaacgccgctcattctcgcagcgtaagaaccgatgtatttatggattctgctcgcaaacacttcaagagccgtttccgctctttcgtttccttcttttgaagcttctacgatatcgcggaggtcgcttgagaaaccggatatgccaagcagtccgctctttttatttaatgtatttaatacttcatctgccgtctgatccgttttttccataatgtacgggatcaatgcagggtcgatgtttcctgaacgtgttcccatcgcaacacccgcaagcggtgtgaagcccattgacgtatcaatggattttccgccttctacggccgcgatacttgcgccgttaccgaggtggcaggaaatcagacgcaaatcttcaagcgggcggccgagaagctcagctgcgcgctgtgtcacgtatttatgagaagtgccgtggaaaccgtatttgcggatgccgtatttctcgtagtattcgtacggaaggctgtacaggtaagattgctcaggcatcgtttggtggaacgccgtatcaaacactgcaaccgcaggcacatccggaagcacttctttaaaggctttaatgccgacgatgttagccgggttatgaagcggcgcaagttctgaaatctcttcaatctcacggattgtttcatccgtaagcaaaacagaatcgctgaatttttctccgccgtgaaccacacggtggccgattccgtcaatttcgtttaaatcctttataataccgaattcagtcagcttgtgaagcagcatcttcaccgcaaccgcatgatccggaatatctgtcacttctgtatttttttcgccgttaacagagatagtgaaaacgctgtcggcgataccgatccgttctactaaaccttttgttagcaccttttctgaaggcatttcgaataactgaaattttaaagatgagcttcctgcgttaattgcaataattttagacataaatgacgctcctatcaaaattcttcttcgtttgttcgttcttttttcccagaccataactgcggtccaaaaaatatctgacttttccatttaaacattgtcaactcagcatttcaagtcaacatccacattggtaccgcttacaatacgaagtcgatattttctgataaatctcatttgtgccaaatggacggcacggccttacggaatgttattttctttccttaatttgtgttttcgccctgatttccattcattttaaaaagcgaaaagcagcgcggaattttgcgtctcacactgctttttcgccattatttttctttttgaatccactgatccaattttgccatcatctcccgcatcgcctgctggttcgcaaaagaaggaagattcgccaaaagcgcttgtttcggcggctttgcgtcttcgccttttttctgcaggattaaaatgctctttgcctgcgcttcatctttaaacatagtagccggcagctgaagcagggcgttgatatatactttttccgcaaaaaaccgcttcagtttatcgctttgcgcgctgtcaaacagatggttcggaatcataaaaaataagtatccgcccggttttgtatgtttgacgctctgctcaataaataagtggtgggcaaatgagtggccttcatccgctttcagctcaaacgcttcagcgccttcgtcattgggatagtagccgaccggcaaatcgcagataaccgcatcggccggttcgataaataacggctgaagactgtcctggcagaacagctccatttctttttcctgcagattcgcctgcgcatatgcgatcttcagaaggacatcgtcgatttcaatgccgaagctttttcccgctttgtcagaaagctggtttgccgcggtcagcagaagatttccggtgccgcaggcggggtccagcaacgtcaggccttttcggccgcccgtaaatttattcacgaggtaactgatgaaaaggccgatcgtatcaggcgtcatctgtctgttcggatgggacttatctttcagtccttttaaaatggcgagctggaacgccttgcggatccattcatgctcccattttctgaagtctgctttcgcaagcaggcttttaagctcgccggtttgtttttcctgaagcggaagctggtccgttgtttcaagaaaatacatctctcccgcctccgcaagcccctcaatataagaaatctcaaggccttctgctatcacttgggcggcttcatctaaaagttcataaatctgaccgacatgatcgtgttgcatgctgtttcctccttgccatgaaaagagctccgcggcagcacccggagctctttttctctctttacttgattaacgcttttgcagcttcgataggcttttcataattcgggtggtttgtcgcttcgcttacgtattccgcgtaaacgacttttccgtcctgatcaaggacgaatacggaacgcgccaaaagacgaagttctttgatgtaaacaccgaatgcttcaccaaatgacatctctttatgatccgataatgtttccactttatcaattccgttcgctccgcaccagcgcgcttgtgcaaacggaaggtcggcgctgattgtataaacgttcacatcaccgagttttgcggcttcttcgttgaagcggcgtgtctgcgcgtcacatacgcctgtgtcaatggaaggaataacggatatgatcgttactttccctttcatatctgctaatgtcttctcttctaatccgtttgtcaaaaccgtgaagtcaggagcttggtcacccggtttcacttcttgtccgatcagcgtcacggctccgcctttaaatgtaatttcagccattctgattcctccctttatctatgtatagctctatcatagtcgagttttatgcaaactgcaaaggttatgccgcatcgtaaaaaaagctaactgcgggcggcagttaacttttctgttataaatcgatatccgttcttttttggttccggcctttttcattctttttaaacatatgctggatgcgttcaatcgtttgaggcgcggagtctaacagtttatcaatcagatgggtgttttcgtctaaatgaagcatacgcacgccgtttgttccgacaatcagaaacgcaatcggcgtaatggatactccgccgccgcttccgccgccgaacgggagtttctgctcttttctttcatcatcatcggttcttttttcagccggctttcctccaaactcgcttccgcccgccgcaaatccgaatccgacctttgaaaccgttaagattacgctgccgtcaggcgtttcaacaggatcgccgatgattgtattcacgtcaatcatttcttttaaattttccatagcggttttcattaaaccttgaatggggtggtctgccatatgcgctcctccttaaactgatgaatcattctttgaagcaaccggaaccggctgtttctttcgtatgatagaaagtccgttccgcccgtatttgagcaatttgaaagctgcacctataagatgtccaaaacgaaaaaagaatatacactgcaaatgcgtcttggatgcaggcacttgaaaagacggaatgacttcgcacaccggtttatgtatgaaacgcagatgatcatacagcatcgccgtaaggcctccctttacggcccacaatccgccggcggcgattcccgtaacggcggcgtcctttattccgataaccgtcacccattcaaacttcgtaacacggactcccgcaagaaatgaggcggcgatttggcgcatctgcaagacttggtgcagaatcatttctattctgtgaatgctctgtttgacatcttcatatgtgatttttttcttctcttttttctgacctttcatttctgatttcgtgtcctgtttgacatcaatagacgcgtcttcgctgtttactttaatgacgggcagcgtttttttaaaacggaccagcccgtataaggccgagagtttaaacgtcagtttgtcgttatctttatcgtgaagatattcgaaagtcagatggattttcatcctcatgagcagccagaccaaaatgagaatgagaataacagctgctgcggcatatcccataggcttcacttccttagcagcattatcgccaaaaccaaaaaaaataaacccggacgtttattccgggtttactgcttttatttgcggtacagcgcttcgtgaatcaccgttgtgtcggcgatcagatcgtgaatgccctgctttttgggcgtaaacgcaatgacgatatagagaatccagattttatcgatataacgccccaccgcttctctgaaaatgacggtgctccaagtcagcggctttccgggcgtcaaagaagtgacctttaacccgaagaccatcttgccgagtgtctgatgaaaccatttcgtcatgaacacaaaataggcgaggtagacgatcagggttgtgacggaataagctgagattgtaaacattccgcttgttgccgggagcttcatcagcgtgaaaatcggtgaaacgatgagatggttaagtccccagaccaccagccaatcaagaagaaacgcccaaaacctgatccaaaagcccgcatatgcctgctcgggcgccctctgttgttcggcttcctcttctttgccgtgaaagccttcgtaagtcgcgtccattctttcttcccccctactttgcatagagatacatcatccgcggcgaaccggattgcgaaatgagttctttcatattcagaaaatcaatttcgcttttaaacattttcgctgcgctcatggaaaagagcgagcctaatccgaatccttcctcgtatgtgatgactgaagcgtttttcatatttttatggtcctttttcatcgcgctgatcgtatcatcgtaaaaaccgagctcatcaacgaggccgatttttttcgcttgtctgccgtcgtaaacacggccgtcggcaatttttttcacatccgcttttgacatgtgccggccttttgaaatgacattgacaaatccttcataagaatcgttgaccattgtctgcatgatctttctttcttccttcgtcatgtcgcgggtcggggacatgatgtctttatgcgcgccgcttttaatggtttcaaacttgatgccgagttcatcggcgagcttggaataattgacgctttccatgatgacgcccagtgaacccgtgagcgtttccggtgaagcatagattttatcggcggccgttgaaatatagtagcctcccgatgccgccatggagcccatggacacataaatcggtttcttcgtttctttctttagttcttccagttttttatgtatttccgcgctttcgtacacgcctccgcccggggaattgattttcagtacaattcctttgacgcttttatcttctttcgcacgctcaacctgttttaaaaatgatctgtgatcatacccgcctgagctgagcaggccagcggacccgccgttatcctcaatcgtgccgtccacttcaagcacggcgattttactgccggggctgcccttatccagcgtcacttcctctgtgtcatctgtcagtgatgcaaagtcagaccctgtatctccgatattcttcagcaccccgacggtcacacttgcaatgaccgatacgccgaaaatgccgagcgcgatgacgagcgcaatccatctttttgcattcatttgttctcctccttttctgtcaatattcgtacgttcccccgtaaaaaaagattcatttttttcatgaagcgctttctcttaacggataaacaggaaacatgttacactattgccacaggtattttaacacaatacctgctgggagaaaaacgtaaatatgacagcaaaggggaatggggatatgaccgatcttcgccgcaatgtttatttttttcacaaacaaaacaacgaaacaaaagaacaagtcagctctttgaagcagcttgctgaatcgcacggttttacagttgcggctcacccggaggatgccggaattatcgccagcatcggcagcgacggctcatttctgcaagccgtcagaaaaaccggattccgtgatgactgcctgtatgtcggcatcgctaaaaaagggaaagcccatttgtactgtgattttcacagcgatgagcctgaaaaaatggcggccagcatgaccgcggaacagcttgaggtcagaaaatacccgctcattcatgtaacggtggacggcagcaatcattttcactgtttaaacgaggtttccatccgttcaagcattattaaaacgtttgtgatggatgtgttaattgatgatcttcattttgagacgttcagaggagacgggatgatcatttccaccccgacgggcagcaccgcctacaataaatctgtttcaggcgccgttgttgatcctttgatttcctgcatgcaggtatccgaactggcgtcgttgaacaacaacacataccgtacactcggatctccgtttattttaagctcagaccggaagctgacactgcaggtggtccaggacggcaatgagcatccgattatcgggcttgataatgaagcgctcagcacgcggaatgtcaaaaaggttgagattacactatccgataaaaaaatcaaaacggtgaaactgaaagacaactctttctgggaaaaagtaaagcgatcatttttatcataaaaaaagaggacgggcatcactgcctgtcctctttttcatatacgatacggccgccgacgacggttttgacagcttccaattcatgaagctttttcggatccgtcccgaacggatcaccgctgagtacggtaaagtcggcatcatagccgggggcgatccgtccgcggctatgttctttatggatgatggccgcgcttccctccgtgtaaagctgaatggcttcgtacacggtcaggcactctttttcataataggccggaccttccggatgctgcttgcttgtacggagcacagccgattgaatgcccagaagcggatcggccggctcaatcggggcgtctgagcctccggcgcacagcagcccttttgacagcagtgttttccaggcgaaagccgttttcatccgctcttctccgagccggtcaatcacccacggaaaatcactggccacaaaatgcggctgaagatcaagtccgatcggcagccgggcggctctttcaatcaatccggcatctaatacttgcgcatgaatgagcctgtctagctgtccgggctttgccgggtatctttcgataacatcgagcaccttttcaaatgcaaggtcgccaatcgcgtgcacggcgatctccatccctttctctctcgctttataaacaagagcggcaagggtctcgtcatcgtgcacctgaacgccggaaactgacggatcatcatgataaggctttttcaacagagcggttctgcctccgagcgcgccgtcagcaaaaattttcatcgctccgtattccaggtaaggtccggtcgatttatccagagcgctccagctgtcgacggcttcgtgatgaacgagcagatgggcgcgaaaaggataaaggccgctgccggttaaagactcgtacgcggcaacgggaacggacgcgtctccgtagtatgccagatcttctgaatgcccgcctgtcaggccttttgaccagcagtccgtaatcgccgtttgaagcgcgcgtttgacatagtgaagtgagacgggcggcagggcctgtgtcacaagctcttgggctttatccagcagaaggcctgtcggaccggtgccgtcccggacgataatcccgccgtttggatcagatgtttcgtttgtaatccccgccgcgcgcaatgcggccgaattaaccgcaacggcgtgccggcatacccgcttcagcaggacggggcggtcgggaaagagcgggtcaaggtcatgcttcgtgacgtaatccggccgttcaaacaggttttcatcccagccttcgccgatcagccattcgccatcttccaattcacgctctgcttcttttgcggcccgcaggatcgcttcttttgacgtcagctgcgacaaatcgaggcgaagctgtttttccccgtgtccgattaaatgcatatgactgtccgtaaaccccgggaacatgacagctccatgtaaatcgatttcctccgtatcaggcgaaccgtatgttccttggagctcccgatagctgcccgtcttcctgacgacgccttcttcggtataaacggattcagtgacatgattcttgtcaagcattgtatagatggtgccgccgtgccaaatcgctttcatccccgctcaccctttatcctgtattatgcttttttatcagccttcagccgttcttcacgctgtctcagttccacacgtctgatttttgcggacgccgttttcggcaggctttcgacaaattcaatctctctcggatatttgtaaggcgccgtaatcgtttttacgtggttttgcagttctttgacaagttcgtcactccgcttttcatcgtcttgtaaaacgacataagcttttacgattgaacctctgatttcatccgggcttgccacgactgcacattctttcacttccggatgcttcacgagcgcgtcctctacttcaaaaggtccgattgtatatccggagctgacgataatgtcatcattgcggctctcaaaccaaaagtagccgtcctcgtcttttttcgcgcggtctcctgtaagaaaataatctccgcgaatctgctttttcgttctttcgggatctttataatattccttgaataaggccggtgtgctcaaatgcacggcgatatcgcccgtttcgcctgtttcgcatatttcgcccttatcgtttataatctctacttgatttccgggggtcggtttgcccatgcttcccggcttaatatccatatccttcaggacgccgactaacagggtgctctccgtttggccgtatccgtctctcactttaataccgaaatgcttccggaatacgtcaatgacttcccggtttaatggctcacccgcagaaactgcgctgtgaagggcagaaagatcatatttgtccaactcctccacttttgccatcaggcggtattccgtcggggtacagcagaagacatttacttgatggcgctccagcagctctaaatacgtcttggcgttgaatctgccgtgataaatgaatcctgtcgcgccgcttcccagaacggcgagcagcgggctccacacccatttctgccaaccgggcgccgcggtggcccacactgtatcgtcttcggaaatatccagccatgcaccggctgatgtttttaaatgggcaaaggcccagccgtgtgtatgtacaacgcctttaggctggccggtcgtgcctgaagtataggacaaaaacgccatgtcctctcttgttgtatcagctgtttgaaaactgtttccgtccgcttcaatcgttaagaggtttttccagccggcatcattttcaccgattgacaatgtcaccagctgctcggtattcacctcgtcaaatgcgtttataaatgaaggataaacgatagcgcctttcacttcggcgtgtttgatccggtattcaaggtctttggcgcgcagcatttccgagcaaggaatgacgaccatccccgcttttaagatcgctaaataaacggcatacgcttcaagcactctcggaaccatgacaatcagcttatcgcctttttcaaatccgagacctttcaggcgggctccgattttattcgtttcttccatcaatttttcatacgtccagactttcttgccgcctgtttgatcttcccaaataagcgcgttcttctctttggaacggctgaacttttcgatttcatttacaagattatagttctttggggcgattaaatcttctcgttttaacacgaacaactcctcactttctttccccattatacataaacataggccattacaataaaaatatgcataaattgcttccagccttctatctatactcatgaaaaaagagcggggaattccccgctctcttagccattatgtgaagttgtgattaaaactgctgctggctgcttccgcccatgctttgctgagcaaaagagacaagacgttttgtgatttctccaccgacagaaccgttggcgcgagaagttgtttccggtccaaggtttacaccgaattcagaagcgatttcatacttcatttggtcgatagcttgagcagcgcctggcactaaaagctggttgctgtttccgctgtttgattgttgtgacatgtgtatcacctccttgtgagtatagaatgtgataaaacacatgtcttcattcaaaaaaactttggtaattgtatacagttttaaaacaggccggcaaacttatcgtgagcttcctgctctgagtaaacagtgatggtttcgatgccggcagcggcctctgcaatcagcggttcaaaatcaacgaagctttcgaagtgctcgattttttcttttttcggacgcgttttcggacttggcggcgtaaagatggtgcagcaatcctcaaacggctgaatgcttgtttcataagtgccgatttcttttgatttctcgatgatttctgttttgtccattccgattaaagggcgcaaaaccggtgttgccgtcacggcattgatcgcatacatgctttcaagcgtctggctcgctacctgcccgaggctttcccccgtaatgatcgcgagcgcttttcgttcttctctgattctgtccgcgatttgcagcataagacgccgcgtcgccgtcatcgtatagttttccgggatttgtttttggatgagttcctgcgtctttgtaaacggcacgatatgaagcgtcatactgccgccgaacttcgcgaggcatcccgcgagatccatgactttctgctttgcccgttcgctcgtatacggcggactgaagaaatgtacggcttcaactgataatccccgtttcatcgcgtaaaaaccggcgaccggactgtcaaaaccgccggaaagcatcagcatcgctttacccgcggaaccgacaggaaggcctccggcgcctttttcgttacgaatggtcaggaatgtcgcttcctccctgatttcaatccgaagcggaatatcgggatttttcacatcgacggttaatccatccgtgtttttcaaaatatggccgccgatttcagcgttcatcgcattcgtatctaattcaaactgcttgtaagcccgtttggtctcgaccttaaacgtattccccggtttatattcgccttctatcgcggctaaagccgtttttttaatgtcttccagcttgctttcgcatttaattgcgagactgaaactttgaatgccgaatatattctttaataaggaacaaattccctccgggttttctccattaagtgtaattgacatccggtcccggtttgaaaagtattttacttttttataatcctttaataccaggcggatattttgttttaatctttcaataaaactgcgtctgttttttccttttgtggatatttcaccaaaacggattaaaatatgatcgtaattcatatgctacctcatcattttttttagtttttgaacagccggcaccagcgcggccataaacggctccgtgatgtcagccgtatgcatgaagttcaggctgactctgatgctgcttgatgcaacctgttcgcctttattcatttgcagaagaacacggctcggtttatgctctcttgccgaacatgccgcggttgtggagacatatattcctttttcctcaagcatgtgcagcagcacttcggccttcacgcccggaacggaaaaattaatgatatgcggagcgctgttttcggcgggagtgttgatgacgaccccgtccgccccgctcagcctttccatgagcgcattcttggcagcctccacggaagaaagccgctcattcatgtcacgcgcggaaagattgatcgctttcgcaagggaaacggcgcctgccgtatgttctgttccggcccggacgcctttttgctgcgagccgcccgttataagcggaatgagccgcgttccttttttgacgataagcgctccggtcccttttaagccgtgaaacttatgccctgaaacagtgcaaaggtcaatgcccgcttcttctatagacagaggaactttatgaatgccctgcacatgatcaacatgaaacagaatattccggtgctgcttcaaaaacccgccgatttcctttacgggctgaatggagccgacttcgttattgacatgcatgacgctgacgattatcgtatccggcctgatagccgatttgacgtctttcaaagaaacgaagccgttttgatcggccggaagatatgtgacttcaaagccgaacagctctgtcagctgatcaagcgtctccgtcacagaaggatgctcaatcgccgaagcaatgatatgtcttcctttactcatgtttgcccaggccgctccctttaacgcagcgttattcgcttcagtcgcgcctgatgtaaatacaatatcataattttttaaacgtaaggttctttttatttgctgagcggccgcttcaaggagctgctccgtctcagttcctaactggtgcagagacgaaggattgccgaaataacggctgctcgtctgtttatacacttccaaaacctcttcatacggctcggtcgttgagctgttgtctaaatatatcattttttttactccttttatgaaaacggtacatcgtatgatatttatgctaccataacaaaagtaaatagaaattcgcaataaatcgagtattgacttctctgtacattgccatataataagtaatgttcgttttgttatattatctgacaattaattgacagaatatttcaacatagtatttaggaggacttttatgaaacactcactacctgtcaaagataccgttattatcggtttcatgctcttcgcactttttttcggggcaggaaatatgatatatccgccggagcttgggcaagcggcggggcataatgtctggaaagcgatgggcggtttcttactgaccggcgtaggactgccgcttttaggtattatcgccatcgcattaacgggcaaagacgcgaaaggacttgccgataaggctcacccggtattcggcactattttcaccgttgtgctttatttatcaatcgggccgcttttcgcgattccgagaaccggaaccgtttcatatgaaatcggtgcagttccgtttttaagcggcattccggaaagattatctttatttgttttcacgttgatctttttttctattacgtattatttagctcttaacccgtccaaaatcgtggacagagtcggaaagattttgactcccattaaattcggtattattttaatcattgtcgtaaaagccatcgtcactccgatgggcgggctgggcgccgtacatcaggcatattccggaacgccggtgttcaaaggatttttggaaggctataaaacaatggatgcgctcgcctcaatcgtcttcggcgtcgttgtcgtcaacgctgttaaaagcaggggcgtcacccagcgtaaagcgctcgccgccgcttgtattaaagcgggtctgattgcagcggcgggtttgacattcatttatttatctttggcctatttgggagcgacaagcacggacgctgtcgggccgctcggcgaaggcgcaaagattttatcagcttcatctgattacctgttcggttcactgggaaacattgttctcggtgccgccatcaccgttgcgtgtttaacgacaagcatcgggcttgtcacatcttgcggcgaatatttttcaaaattgattcccgctttatcatacaaaatggtggttacgattgtcacgctgttcagtctggcgatttcaaatttcggacttgctgagattattgcattttcagttcctattttatcagccatttacccgctggcgattgtcattatcgtactttcctttattgataaaatctttaaggaaagacgcgaagtctatatcgcctgcctgatcggaacggggctgttcagtatcctggacggtttgaaggcagccggcattccgctcggatcattagattcattcttaaacgcaaatcttccgctttacagcatgggaatcggctgggtgcttccgggcattgccggagcgatcatcggctgcatcatcacgttttttatcagcccgcccatcgaattaaataaagcaaaatcgtaacattcagcgcctgcggtttgatgtatatcagccataggcgctttttatattccgtgagaaacaaaaaaactgcacctctgatttccatcagggtgcagtttttgcttgtgcgtctatgaagcagattgatcagctttaatttttttcacggcgccgggagctgctttttcaacagcatctgccgccatctcataagcttcattatagctgtaagcgtaaaacagccgttccgcttctttcagctgttcggataaaatatgattctggcttcggaaacggttgccgtactgaatgatccgctcaatcagcttcacctgaatcacaagttcttccgcctcttcgctgacttccgcaaccaccttttcagcttcggtcagatgtttggcggcttcctccatgtttaacggcagctcttccaattggctgacggtctcttctatatgatgatttgccgtctcgagcttgtccttgacttgttcaggaattcccggcacgttgcttttttgcagcattcgggccgtgtcagaaatggttttccgaagattcatcagcgtttcccgcgcctgcagttcttcttttctgagcgcctgcagattttcacggtattcggcatgttctttctgagcttcttccatctgcttttcgatggcctcgacttcttcaatcagcagcgagtaagcgacatgctcaccgtcaagcttttctctcgcctgctcaaggagccggccgatcgtttccagctgtttttcgaaagcatgctgtctgccgatttctcccgccgtcagctgatagctttccttgacgagctccgtttcggtttttgtgcggtctttttcttcctcaagcttctcatacgcgatgatcagctcaggcattttgcttaatacggactgtccggcttccacttcgccttccagctgttcatacatcgattgaatggtttcatcaatcagctgaagaatggcggacgcttcgtcgacatctaattcttccaaaagcgcgctttcggcccgtttcaattgattggtgagtgtctccagctctttttcgatttgaatatgctccaatttgtagcctttttccgtcatttcccggtagccgtctttcagcttggcaatttggttaggcacggtctgtttacagtcagcgagcagtttcggaacgtcatctatgtatgtttgaagctgatccagtctgcggtcctgttcaagcagcacttttctcgctttgatgtaattgccgctttccgtctcttcttcgaacttttttatgccgctccagatttcgtcgagatccgtctccaggctgttatatagctctccgtagagatggctatacgccagaaggttttttcgcgcttttgaataccgctcacgcacctgttcaatctctccgcggcttttttcctcgctcgtcacaagatcgctgatctcacgcagtatgccttctatatttgattcggctgcagtgaggaggtcgtcgatgtggacaagcacctgattcgcttttttaaaccggtatttgtcggcgttctcttcggcatcataaaggagctcttctactttcggcagatgggctgtgacaatttcatcccactcttcgcgccatctttcaaagaactcttccgtctctccggtcattttcagatgtttgatcttggacatttcttccactatcgaacggtttaaaatttcaatcttccatgactccagccggtcaatttccgtataaatttttttcctgaaaaagtagcccgccgcaaagagcgcgagcagtataaccaataatccgatgactaactccataatgagcccccttgttgttctcttaatctgtcagggtgttttatgtattcagaaagatttcaatatatgtattgagaaaatctgtcgttttcattgttattatgataccatgtaaccaacattttttgaccagaaatcaaaaactttttgcataatttcggcaggattctgcaattttttaatggagtgacacaaatggaaaaacgagacgctcatatccacacgcctttttgccctcacggctcgaaggatgcgctgaaagaatatgtcgaaaaggccctggaaagaggctttgactcgatcacatttacagagcacgccccccttcctccgtcatttcaagatcccgtaccgcttcaggacagcgcgatggatctcagacagatggaggtttatttggagcggctgtcacagctgaaaaaggaatacgatggacaaatcagcattctgaccgggctcgaaactgattttatcacagggtatgaagaggaaaccgcggcgtttctgaacacgtacggcccctcactggatgacggcattttatccgttcattttttgaagaccggtccgtcttatatctgcctcgattttgacgagcacgcctttcagcagctcgccgcgcacttcggaagcgttgaagccgtatatgaacaatactatgaaactgtgtattcttccattgtaacaccgctcggcccctttaagccaaaacgggtcggccatatcacgctcgtcaaaaaattcgcacgccttttcccttacagcatgtcacctcaaataagagagcttgcggcccgctgtcttgacgccgtgaaagaacacggaatggagctggatgtgaatacatccgggctcagaaagaagtttgccggggaagtatacatggaggattggatggctgagaccgcgaagcaaaaaaaaatcccgctcatattcgggtcggacgcccatcaagcggaagatgtcggcagttcctatgaaacgtacaaaagcatcattacttcataagcgccgcatcaggccgtcggaacacgctttcgatccagatcttcacctcttcaaaataccttttataaaagtacggttcatgaggctgcatatagagcacctctgtaatgtattgaggctgaagatacggcatcatcaagagggatttcaattgcagaataaaatgcggcacgggcagcgtcagccgtctgtggcgtgactgcccttcttcaatcaccagctggaaaatatatttttctttcattaagtaagtagacataatttccctgataagcacggaatcaatcgtcacttcccggtacacaaaccgcgttagttgacggttatcgtgctgataggataaaatatcgaaaatcacccgcaggatgcgttcctgcgcgtcttcaccgttcaaactgacggcggctttttccagcgcttcagtatagccttcgtaaaactcggaaactaaatgttccattaatccgcctttccctttaaaatagtaggagatgtgcgcaacattaacatcagctgactttgcgatttcacggacggacgtgccggaataacctttttggttaaacagctggacagcggcgttaataattttgtctttggtgcttactttcatacggctcacccctttatgtgtaacaattcaagcagaaaggcgccgttcctgtaagaacttctcgacaaatgccggcagaacggccggaactttgtttgatattatagaaaaagtgagggttttccatgtttcatgtcgaaaaacaatccggagataaagaaaaaagttatcagcttctgcttaaacagctcgaagccatgacagaagatgaaacggatgcgatcgcaaattacgcgaatgcatcagcgcttttataccattcattacatgaagtcaactgggcggggttttacttcgctaaagagggcgagctcgtgctcggaccgtttcaaggacttcctgcctgtgtgcgcatcccgttcggcagaggcgtatgcggcactgcctactctaacggcgccgtgcagcggattgccgatgtgaatgcgttcccgggacatatcgcctgtgacgcggcttcccagtcagaaatcgtcctcccgatccgcgtaaacggtgaagtgatcggtgtgctggacattgacagccctgtgaaaaaccgttttgatgaaacggacgaagcctatttagcaaagtttgttgaaacgcttgaaaaacgattaggataaaaaaaggagcccggccggcaggccggctccttttttatgtcgtcgtgctgttttggtggatgatcagccggtttttgccgttccgtttggcgatataaagcgcctcgtccgcttgctgaacgagcattttcaacggcatcgggcctgtctttgaccagcaggaaacgccgcaggaaatcgtcacgcgcggctcggtgttttcccggatggcgcgaaccagccttttagcgatgcgttctccggatgacacgttgatattcggcagatagacagccagctcctcgcccccccaccttgcagcgacatcatgctcacgaatatggtttttcataacggaggccacctgaatcaggatcgaatctcccgtttgatgaccgtatgtatcattaatggttttgaaattatcgatatcaacgaggatgaatacaccccgtttatgaattttcatgctgtattgaattttctcatccaaataggttcttgaatacagctccgtcagctggtctgtctgaacaagatgctcaagcctgtcgcgcagcatggagttcgtgaccgccaatgtcgcatggtgaatgagcgcttgaaaaagcttatacatttcaaacgtaaaagcatacaaatcctttttcaataaaatcgcgaacccgaagacggtgtcattttcgatcatcggcaccgccatcagcgagccgaagccgttttcgccgaatacagtctttccgctgccgataaacacgcccttttctccctcgaacagcttttctttcacaatgctgatataggggttcgcacgttctgtcttaaaaaaagcggtatgtcccggaagcagattttgcgtctcaaaatgatcaatatgaaaaaaagccacttcttccgcatgaaatgattgggtcataatggcggcgagttcccgcatcgtgtcagtgagtctgaggcgctgattcagctggcgcgatgtttcattaatgagctccagattcgcaatgctttttttcgattgctcatagagctgcgcattttcaaatgcttttcccgccgcgcccgcaagcagcagcatttcactgagagtactgcacgaaagaacggcatcctgcagcccctccgtcttcagaaccccgtaagtcccctgctggcctttgatcggcaggtaagcagatgacctgccttttctgagcagtctccccgataaataaaccttcagggcagacggatcggcatcttttccatccatatgtaattcttttgcgggaagctgtctgtccgtatcctgatcctgcgtgataaacagtgaaaagcggaaagaccggaaagccgtactcaaacttgcctgcagtttttccaaaacctcattttgatccaaaagcgaatggaacatttctgtcattctgtgaattttccgctgatgcttcgttttgtcaaacagcccgctttgtctcacagattgattgataaactgagtaacgatctcaggcaatgattccgggatcggcagcccgccttccgagcgcagataaaaggatctgccggacgtctgattcctgatcataaaacggccgtcactctctttcagcggagcataatgcggttcatcttctgtttttatggtgaaacgtgttgattctgccggtgaaagggtcaatgaaagagatgtaaagcaggattctagagctgaggccagccataacagcgagtcggataatgagacggattcagatttcgttaagaaaaaagaaagcattttctgatgaaaggccgtcacttcatcaattgtttgttttttcatttttatcacctaaacatgtactactcatttttgtacattatatcataaaccggcactcttcatggagaaatggttgacggcggcggggaaaaatcatataatgttctttgtgtgaaatattgcagcctttttgttcagcttctgtgtttgcattttgttccttagctgtaaggtgtatcgtgtaactctctgctgctggagcgaggatacatgaaaacaaaatgtgcacggtcggatcgaacagacggtttttattttccacaaaataaaaccaaaggaggagtcacattatggctcgctatacaggtccatcttggaaactgtcccgccgtttaggaatctctcttagcggtacaggtaaagaattagaaaaacgcccttacgcaccaggtccccacggtccgggacagcgtaaaaaactatcagaatacggtttgcaattgcaagaaaagcaaaaacttcgtcacatgtacggtgtaaacgaacgtcaattccgcacattgtttgacaaagcggcaaaaatgactggtaaacacggcgaaaacttcatgattcttttagatgcacgtcttgataacgttgtgtacaagctcggtcttgcacgcactcgccgtcaagctcgccaattagttaaccacggtcacatccttgttgacggaagccgcgttgacattccgtcttaccaagtaaaacctggtcaaacaatcggtgttcgcgaaaaatcaagaaacctttctatcatcaaagaatctgtagaagtaaacaacttcgttcctgagtaccttactttcgacgctgaaaagcttgaaggtacattcactcgtcttccagagcgctctgagcttgctccggaaattaacgaagcgcttatcgttgagttctactcccgttaagtaaaacgctctttaaagagcattggattaaaccccggacatgttgtgatgacaatgtttccggggtttttcttttgggctgttccctctctttattaaaaaagcccctgtccggggcttttttttatgtgccaaccggcttttcaactacatgtacattagaaaaccccataatgcctgcaacagataatgccgcaaaaagaattctctttttcatcaaattcctgccgaaacgcagaaatgagtttgttattttttctgactcaccttaatcatttgacaggcagaagcgattttttacataatgaatcatcatacttacaaaaaggagagacggaatgaacagcatcccctctatcgtcagcaagcacaaagcctattttgcggcggggcatacgagaccgctagaatcaaggctgaacatattgcaaaagctgaaacaagccatcaaaacacaagaagccgatatagcagccgctctctatcaggatctccacaaatccgaacaggaggcgtacacgacagaaatcggaattgttctggaagaaatcagttttgtgatgaagcggctgagaaaatgggtcaaaccgaagcgagtcaaaacgcctctgactcacctgggctcgaaaagcatgattatccctgagccatatggaatcgttttggtgattgcgccttggaattatcccttgcagctggcgctttcacccttgattggagccattgcggccggaaacacagtcgttctcaaaccgtcagaatatacgcctgcggtttccgctgttctttctaaacttatcagcagcgtttttccgagtgattatgtcgctatggcggagggcgggcccgacgtcagcactgttttattacagcagccctttgactatattttcttcacaggaagcgttgccgtgggaaaaatcgttatggaggccgcctccaaacaattaattcccgttaccttggagctcggcggcaaaagtccctgcattgtccataaggatgctgatatacagcttgccgccaaacgcatcgtcttcgggaaatttacaaatgcagggcaaacctgcatcgcaccggattatttagttgtccaccaagatatcaaaacgaagctcatagaagaaatgaagcatgcgatcagtgaattttacggccctcagcctgaacaaaatccgcagtacggcaaaatcgtcagtgaacgccactatcagcggctgctcagctttctgaatgatggcgtcccgcttacaggcggacaatttaatcctgaacaccacaaaatagcgccgacgattctagatcaagtgaaggatgactctccagtaatgcaggaggagattttcgggccgattcttccgctgtttacatacggcgatatcgatgaagtcatcgagaaagtccaatcacgcccaaagccgctcgctctttatgtcttcacaacaaacaaaggaatcgagcgaactgttttagagaatctgtcatttggcggcggctgtgtcaatgatacgttaatgcacgtcgcgacaccgtatttgccattcggcggcgtcggagaaagcggcatcggcagctatcacggatttaacagctttaacgcatttacgcacaaaaaaagcgtcgtcaaacaaacgaaccgcttcgacctcgctttccgttatccttcttccaaaaacgggctgcgaatgatccggaaaatacttaaataaaaaagcgcagagtatctgcgctttttataaatcatctatacaccaattaatcggttcgtctcccaaattaaacctatttttaaaagttcaaatcgaagtctaaccgcaaaaatgaaccaacccaactgtaggaaaggttaatccttatcaccctggtgagtcctataataattttcagcggtatagatattccactcccaaaaatttgctccttgacacaaaatataccgatctaaaaatatctcaaaattaagtttcattggttcatactcaataaatccgcggaaccataaatagtttggatctgtagaaattttggttttgtcaattaacaaataacatccgtctaacagatgtgcgacaggaataaactgaggctctaaaaaaccattttgcatatacttttcaatctcttctaaatcaagaatatgcaaaccccacctacattctcaccgtaaatcaacaaatcaaatattctggctccgttatgcaattttaaaaaggttttataatcttcaggaagtgagacttttattttcttctcaaaactctcaatctccagatctgttgcacctttaaagaaagtacattctgtttctaaaagcgttccttcattccctaaaatgttcaagcggcctttttcatcaattaattcttttagaccttggagcgttttttcaacaaaaactgccattgagccacctcttattattagagcattgctattttattcacaagagcaggagccaatgttccagttgaagtatcaggaagagaacctttccatccggctactgaagtatgttgggacataaaaaactttgtctttttaggataatacgactttgaatatgatttacctgcttgaaaattctatgttatggggaaaacctttcgtattaaacatataaagacagtctgttaaacagactgtctaagatgttgttacatcacaccatactcagctgcggtttaaataattcatagtgaatggattccggcgttatattgaattcagaaatcagctttttcatttctttaatgaacgacggggatccgcacaggtaaaaatcagcatctttatctgtcatcacttcttctaacagctgtttgtcaatccggccttcccgaaaacgaatgttttctgaacggtcttgttcggacggttcgctgtaaataaagacggtgtcagcggatgagtgttccgcggcttcttcagcttcatgccgcagcgcatgatactctccgctccttgccgcatggataaagagaacgtttcgctgcggctgggttttggcaaccgtctttaacatgctgatcatcggggtaattccgacaccggcactgatgagaaccagattctttttggaatcagggtctaatacgaaatccccggccggagcgctgatctcaattgaatccttttcgtgtaattggtcatgcagatatgaagaaacaattccgtcttttttcacggaaatccggtaataatccttaccggatacatccgacaaactgtactggcggatatgcgtataacccgtgtccggaatgtatacttttacactgatatactgtcccgctttgaattcggggagaacttgtccgtcttccggttttaaataaaacgacgttatctctttgctttcttttacctttttatcaattttaaacgccttatcgtctttccagccgcctttttgcgtttccgcttgtttatacatgtccttctcaattccgataaaagcgtctgcaatgacgccgtatgctttttcccatgcctgaatgacctcaggagcagccccgtcttttagcacatcctttatcgcgattaacaagtactttccaacgattggataatgctcgggcttaacaccgatactccggtgcttatggctgatttgtttgacgacggggactatgttttccagccggtcaatattggctgcggccgcaatcacagcattcgacaaggccgtacgctgtgtttttttcttttgattcgtctgattaaagatattcagcagctcagggtgatgctgaaaaagcaggtcataaaatcggcctgtgatttcttcaccatgctcttctaagaccggcactgtgcttttaatgatttcaatcgttttttcatcgagcattctgaaatccccctaaagatgtatgcatctcgattgacctgaaaaaagaatcgtttttgaattcttttttatagatttccccgttcaaaaagggttagccattccaatttgagacggattcaggaaaaaccagataaacgaaattgcggatggaaaattgtggacttgccatagtgtacttgtccgatgcaaaatcctccttttcagcatttaataaagtacgggaggtgagatgaatgggtaaaaaatcgaaagtgtattactgtgaccctaagtatattgtgactgacaagtatactgacaaagaagtggtttacgtccatcccatcaaacacattaacagagaacatatccgttatgttccccgccacgtttatcaggaagaaacaattcacgaagtcattgatccgggcgatccggggaaatgcgggtgtaaaaaggataaaaaaagacgcaaaaagtaattggttcgatttcttgcctcagcagacctccgtaccttttggctcctctttttcagaggggtcttttttcatgccgtatcttcaagcaaatacgttgtgaggcggcaatccgcctgatattcttgtcatatacaaattcacaggaggcatgatgatgagcaaaaaaatcgcagttctgatgacagatcaatttgaggatattgaatatacaagcccggcggaagcatttaaagaagcgggccacagtgtggtgacaatagatttagaagcagggaaagaagtgacgggcaagcacggtgagaaagtaaagatcgatcaagcgatctcagacgcagaccccaaggaattcgatgcgttattgattcccggaggcttttcaccagatcttctgcggggagatgaccgcccgggtgaattcactaaatcattcgtggaaaatcagaaacccgttttcgcgatctgccacggcccgcagctgctgattgataccgaccttcttaaaggaaaagatatcacgggattccgcagcatccgcaaagacttaatcaatgccggcgcacattataaagatgaagaagtcatcgtgagccataacatcgtaacgagcagaacgcctgacgatttggaagcctttaatcgtgaatcattgaacctgctgaaataagcgaataaaaatgcacagacccgttcagtctgtgcatttttttatggattgataaagaaacaccaatagttagacctattctcttccccatccataataagtaaaataaagagtgggtttttcaacactcgacgggaggttcacttatgtggatgatcattttgctgctgatcattttaatcggttttaccggtaatatcatttcgcttttgagagcgcaaaaacacgcatctcaaagaataattgagcttttagaaaagcaaggccgaaaataatcatgcagcgctgtgttacccgtaatagtaataataattccggcagatttcctgaaaaatgatttgatgccctttctcgttcggatgaagaccttctgacatgcacatgctgcggaaagcgggattatacgggtcgatgagatctgtatcaaacaggtcggcatacggtacagagaggagtgtgcaggcttctttttgggctttcacatagtcagccagcttcaggcccagtttatttttatcagtatcacggcggacgatttttccttttgatatttttgcttgtctcgttggggtcaccacaatggtgctcgcgcctttatttccgcttcgcagctgctgaatcacttgacagaagcctccgtaaaatgtggtgatatccttttcatctgtgccgatgggaatgtggttgcaccaatcatcatctgttccctggacaatgatgacatcatgtccctttgttttaagcgcttgctgataaatgttatcgcttccgtggttgctcatattaacgccgctgacagacagattggttatttcagcgtctgtccggtctttcagaatgtcaccaaagccgtattccgcgcgcagcccccgggcgacgctgtcacctaagatcgcgatttttgaagccttccgcagcctgcttatgctgatgaagtcaatgctgatatgcccgctgtccgtgatatgcaaaagcttgctgcttatgttttgcgaagagactgtctttccttcagagttataaaattcctcattcagcttcattcggcgtcatcccttcctttttatcctccggcatcttttttgacataaaaaacggacacgaacaaacagcgccatgttgtcagttcagtgtccgcagatgatgataccggatcttttatgcagttctcttgccattatagcagatctccattacttgtaatagagtctgcttcagcatttaaaacagcgcttgcgggtacgtttttgatgtgaccgtctgctgcgggaacggtgtgtccggcgatgcgtccgtcttctgctgcgggaacggtgtgtccggtgatgcgtccgtcttctgctgcgggaacggtgtgtccggtgatgggtccgtcttctgctgcgggagcggtgtgtccggtgatgactccgtcttctgctgcgggaacggtgtgtccgttttctgctgcgggaacggcgcgaacattttttggaaaccggttcttggtataaatactcccctaaaccttctctttccgcaacggcaactccatgttcaatttctttaacagaaatagcgttcaattctgttcacctccctttttctttacaacataacgtatgaaatgtacccctcacgtgtataagcttctctctcatatgagcgagaaatagtcatttatacaacaaaaagacccgtggaaacgggccttttgcaggcattttgcagggaacaaacgcaaacttaagatcgatttatttcttcctctcgctctccggctcggggtgaatcattacctgtgcttgtttgaattcattcgtaatagctctttcaatgcggtcacacaggtcgtgcacgtctttaatcgccacgtgagaggctacgaccaagtgaaaatcaatatactcctgcgggccggagcgtcttgtacgaaaatcgtgaatttcaataaattcctgttgaaatgtttcgataatctttaaaattgttttttcttcctcttccgacaaacgggtatcaatcagcggcgggaatgcttctttcattaacttaaacgcttcatatatgatatacaccgccagcaccatacctataataggatcaagtatgtaccactccgttaaggtaacgaccaaaaggcttgccgctacgcctaatgatgtgtacacgtcagtcagtaaatgcagggcattcgatttcattgccacggaattaaccttttcggcttctctttttacgaacttcgaaacgatcaaattaatgagagccccgcaagcatcacaacgattcccaatacgggcagatgaaccggagccgggttgaccagtttttgaacgcattcatatatcatccaaatccctgccgcaaaaatcagcatcgtctcgatggtccccgacagattctcgacttttccatgaccgtacggatgccctgtatcagccggcttttttgaaatcctgacggagataaaggcgatgaaggcggcgatcaaatctaaaaaagaatgaatggcttctgaaagtatcgcgacagatccggttattatccccaccactattttgagcatgacgaccagggaattgcttataaccgataaaaaagcgattttagaggtgttttccaccgtgatcctcctctttttgacttcttgtatttatcgtatcaaacggcattcgtgtgggtctacggcaacgtttttcacaaaagccatacatgtaactcatcataaactaagttggaaagcgacaaaacaggcgaacctttctttcagcactcaagtcccattgacaagatataaccgcttacattatagtagtttcatgaataaccactacggaggatgtttatggatgatgttctgaaagaattacagaagtttggattttctcaatatgaatgtaaagcatatatcggcttgttgaaacactcgcctgttaccggatatgaaatcagcaaaaggtcaggcgtcccccgctcaatgatctatgaggtattggggaaattagttgataaaggcgctgtccatattgtgccgtctgatccggttacatatgccccgctggccggaaaggaattaatcgaccggctccggcacgatttcgagagctcattcggctaccttgaggaaaagttattggcgctggaaagcgagcaggagatgaatgtcatccgccgcatcagcacaaatgatcatgtcatcaatgagatgaaggaaatgattgaaaaagccgaggaagagttgtggctgtctgtctgggaacagcagattccctttattcaagaagccgctaataaacgcgccgccgaacaattgcccgtcttttcgattgtgttcggccctccggaagtgaagctcggaaatacgacaaatcataatatgtctcctgaagtggcggagaaacggatgggcggaagattaacgatagctgcccgagataataaagaagtcttaatcgccaatttttctccgcagacgaatgcctgggccattaaatcagaagaccccgctctcgttctcgtggccatggaatatatgaggcacgatctgatgttcgcagagcttgtgaaagaagtcggggctgaaaaagttgaaggcctgatgaaacaaaaccattcgttatttcatgtcgtcaccggaaatcggttcatataaatgtgaaccgtattttctttgattttttcattagtcgttatcattataatctctatgaaaggagtataaaaaatgattaatacagaagtgcaaaaaaccgccgtttcccgggaaatgaacgatacgtttttacagggggtgcgggattgtgtgcctacgctgctgggctatatgagcatcggttttgctttcggcatcgtcggggttgcctctcatctaagcattcttgaaatctgtttgttatccttgtgtgtctatgccggcgccgcccaatttattatttgctcgctccttgtttccgggagtccgatttccgccattattttaacgacgtttatcgtcaatctgcgtcaccttctgctgagcctgaccatcgcgccgtatttcacgaaatactctctggcgaaaaatatcggcttcggggctctgcttactgacgaatctttcggagtagcggtgaacaaagcggctcagaacggcaggttatacgataagtggatgaacggcctcaatataaccgcttacatgtgctgggttatttcctgcgtgatgggcgggcttctcggacaatggatatctgatccttacgctctcggcctggactttgctttgcccgctatgtttgcggcgctgcttgtgctgcaattgcagtcgtccgcttcggaaaagctgaagcacagcctctccttaattctctatatgatcatttttatggtcttgttatcgtatttcgtcccgtcacacatcgcggtcatcgtctcaaccgtaattgtggcaacgatcggggtggtgacggacaaatgagcatcagcacacaaatgatctggattatactcggctgcatgattgttacacttgtgccgcgcattgttccgtttatatttgtccggaacattcagatgcctgaattggctttaaaatggctctcctttattccgctttgcattttgacggctctggtaacggaaaacatgattgtgaaaacaaacagcgctttgacctttgattggaaagcaatgatcgttctcatcccgacattgctttgcgcgatgctgacaaaaagcttatccatcacggtcatcacgggagtcgtgctgatggccgccgtcaggctgatatggtgacaatcaaaagcctccattccatagaatggaggctttacctttatgatgtcggattttcttcttccgtctctgattcctcggcttcggcgtttatgctttgctgctgttcccaatgatcccgctgcaatctttctttggcgatggtaaacatgaaattcacggcgcagcaccccttccctgttttgcttatactatgtactgtactcatttccccgtgcagtattcacaaaacataaaaaagcagcctgccgcatggagcggccggactgctttttattttcagtacgtgatcaggaagtattttttctttccgcggcgcagtacggtaaattgatcttcaatgcggtcttccgcagtcagaagatgcccgatgtccgtctggcgctcgccgttaatgtaaacagctccgttttgaatgtcttcgcgggcctgccgttttgaaggcgacagtttagattccactagcacgtctactaaagacagttcttgagagcggtctttttcaaacgaaggtacatctttaaatcctaccttgacgtcttgagcggaaagctctttaatattgccgctgaacagcgcctgggagatatgaacggcctgctcaagcgcttcacggccgtgtacaagaaccgtcacctcttcagcgagacgtttctgcgcttctcttttctcaggagctgtctccgttttttcagcataagcttcaatttcctcttttgacaagaaagtaaagtattttaagtatttgacgacgtcgcggtcatcagtattgatccagaactggtagaattcgtacggcgatgttttttctttatcaagccaaatggcgccgccttccgttttgccgaatttcgtgccgtcagcttttgtgacgagcggaatggtaagaccgaaagctttcgccccttcttcttctgattttctgatcagttcaagaccggccgtgatgttgccccactggtcactgcctccgatttggagtttgcagttcttttctctgtacagattcagaaaatcgtaggattgcaggatcatgtagctgaattccgtgtaagaaattccggtttcaattcttgagcttacagtatctttcgcaagcatgtagttaattccgaagttctttccgacgtcacggagaaattcaatgatgctcagctttccgatccaatcaaagttgttcgctatgacagcggggttttctcctgcctcgaaatctaaaaatcgggaaagctgatttttaattttttgcgaccattcgacaacgatatcctgagtatttaacgtacgctccgcttttttgccgctcggatcgccgatcagtcccgtcgcgccgcctacaagcgcaatcggatggtggcctgcaagctggaaacggcgcagtgtcaatatcggcagaaggtgtccgatgtgcaggctgtcagccgtcgggtcaaaccctgagtataaacggattttttcttcgctcagctgtttattcagtccttcttcatccgtcatttgctggattaagccgcggaatgataaatcctctaataagttagtcattttgtctgctcctttgtttatgaaaataaaaaacgccccttcgtttaaaacgaagggacgatataatcgcggtaccaccctactaataaaaacataaaaaagcttttatcactctttttgataacggaccgtgtccgttctttcactactgaaagccttggaatagctttgttcgcaaaagcggttcatgagtgtattcggcatatcttatgtgctgattttcaccggccatcagctctctggaacaatcagatatcctacttgtctcaatcaaaaccttttcgtatgaagcttactcatttttaacataaataagatacgatgtcaacgccgtctttaatcttccattgtggacaggtcgcctgccggcaggttcagctcccatgccttcagcacacgtctcatgatttttccgctccgtgttttcggaagtttatctttgaattcaatttcccgcggtgcggcatgcgcggcaagcccctgttttacaaagaggcgaatgtcctccttcagctgatcggatggctcatgcccttctctgagcgcgataaacgctttaataatttctccccggacagggtccggctttccgatgacgccggcttcggcaatcgccggatgttcaacaagtttgctttcgacttcaaacgggccgacgcgctcgccggatgtcatgatgacatcatcgactctgccttggaaccaaaaataaccgtcttcatccatataagcagaatctccggaaacataccagccgcccggcataaaataagaatcatatttctctttgttgttccaaatggaatccatcatcgacggccagccctttttaatggcgagatttcccattcggtacggcggaagctcatttccctgattgtcaacgatcgccgcttccactcccggaatcggtttccccattgagcccggcttgatctccatgcaaggataattgcagatgagctgtccgcccgtttctgtcatccaccacgtgtcgtggatgcgcttgccgaatactttatgtccccacttgatgacctcggggttcaaaggttctccgacactcaggacgtgacgaagtgaagtaaggtcaaatttggatgccatttcatctccggcgcccataagcattctgaaagccgtcggagcgctgtaccagacactgacaccgagcttctcaatcgtgccgtaccagttttccggactgaatctgccgccgacgatcacattcgccgctccgttcagccacggcgcaaatatcccgtacaccgtcccggtcacccagcccgggtccgcagtgcaccaataaatatcgtcttctttaagatcaagcacccacttgccggtctggtattgctgaatcatggcttcatgaacgtggagcacacctttgggcgttccggtagatcctgatgtgtagtgaagcaggtagccgtctcttctgtccatccattcaatatcaagtctcgtgctttctccctcagccgctttatcataatgaatgattttatctcccgcttctttgctgccgccgacaatgaaaatatgctcgaggtcgggcaggctgtccgccggaatccgttcggccagttcaggtgtcgtcacgacaacctttgcctggctgttcaacaggcggtctttgacggcgccttccataaacgcttcaaataaagggccggcgatcgcaccgattttaattgcgccgagcatgataaagtacagctccggcgaacgcggcatgaaaataaaaacgcggtcccctttttccacgtttccataccgtctcagtacatttcccgcccggttcgattcctccatcatttctttaaatgtgtatttttcattccgatttgcgtccttgtaatacagcgctactttgttttttcgaaatgattcggcatgacggtcaattgcttcgtacgccgcattcagcttccccgtctgatgccaggaaaactccgcttcgacctctttccaatcgaagctgcggtacgtttcctcataatttcgcagatgataattccccttttccgccggcaacgctttcaaattcatgcaacatcccctttgcttatctatagactaattatagtagatgttcacagttttctcaatttttaaaatataaattacaacactattgaaaacgctttatattttgttatgcttaagagagatgtgtttttattaagaaccgacaggcggtgaatcagtgaaacatcataaaacgtaccattcttcatcaattcagacagcagccggccctctattggtagaagggcccgttcctccaaaggacctagcacagtatgagtttcatgaaggcctgacagcctttcgccttcctcatgaacagcacaaagcgttaatcgagatcgccgggcttcctgaaggtcggatcattatcgccagggacggacagacgattatcggctatgtgacgtatttatatcctgatccgcttgaacggtggtctgacggcaatatggaagatctccttgagctcggggcgatcgaggtcgctcccggctacaggggctgttctgtcggaaaaacgttgctgacagtcagcatgatggatgaacagatggaacgctacatcatcatgacgacggaatattactggcattgggatttaaaaggaatgaaaaaagatgtgtgggaatacagaaagatcatggaaaagatgatgaatgccgggggtcttgtctggtttgcaacggatgaaccggaaatcagctctcatccggccaattgtctgatggcccgcatcggcaggcacgtcagtcaggagtcaattgaacagttcgacaggcttcgtttttatcagcggtttatgtattgactgacatacaaaggggataaaaagatgattgcagaacaaatcatgaaacgggacgtcatcaccgtctcaaaacacgactccattgaaacagccgtccgtaaaatgaaggtatatcatatccgccatctccctgtcatcgacgacgagctgcacgtcaccggtattgtcacagacagagacattaaacaggccggccccggcagcttcgaacaaaaggaacgcggcgcgtttctgacaaacaaagtggagaccattatgaagcggaatgtcatctgcgcccatccgcttgactttgtggaagaaatatccgcttccttttatgagcacggcatcggctgtctgccgattacggtaaatcataagctgacgggcattttaacgaaaaccgacgtgctccggactttcgtcagcctgacaggcgcggcccagccgggatcacaggtggaaatcctggtgacggatatgacaaaaagccttgctgatctcagctgcatgtgccgtgatcttcagctgcaaatcctgagtgtgctcgtctatccccatgattccgccgggtcgaacattctcgtcttccgggtgaagacgatgaatccgctcccttttatccgtgccgttcatgaagccggatacaatgtcttatggccgaaacatttgagggatcagccatgagagacagcgtttttgtttactcgccttcttatcagacgtatcaatttcatcaggatcatccgttcaatcagcagcgcgtgcttttaacatacgatctgcttcaggcggcggacgcgtttgacgatggagacatcgtcaaaccgcgcacggccactaaagaagagctggctctcgttcatacggaggattatatacaggcggtggaacttgcgggtgcgggccggctccctgccgcagaaggagaaagctacggtctcggaacggaagacacccccgtttttgccggcatgcatgaagctgcgtcgcttctggtgggcggcaccttaacggcggcagattatgtcatgacgggacaagccaggcatgcctgcaatttaggaggaggccttcaccacggcttccgcggcagggcgtcaggcttttgtatctataatgacagcgccgtggccatccaatacatccagaagaactacggggcaaaagtgttatacattgatacagacgcccaccacggcgacggcgttcaatttacgttttacgacaggtctgatgtctgcactgtttcttttcacgagaccgggcgttatttatttcccgggacgggacaagtactggaaaaaggaagcgggcaaggctacggctattcttttaacattccgctggacgctttcacagaggacgattcctttctccacgcttacaaaacggccgcctctgaaattgcggctttttttaagccggatgtgattcttacccaaaacggtgcggacgcccattattacgacccattgacacacctgtccaatacaatctccatttatcaggagatcccgcggctcgctcattcattagcccatcaatattgcagcggcagatggatcgcggtcggcggcggcggatacgatatttggagagtcgtcccgagagcatggagccgcatttggcttgagatgaaagggattgatcccggggagcgcataccgcagaaatggattgataaatggcagaagcattccccctgcacgctgcccgctttttggagtgatcctgaacaattatatcctccgattccacgcaaagaagaaatttcagaaaaaaatgcccaaaccgtggaaaaagcactttttgccatccggtctgagcagcggtataaaacaaaataaaaaacgaccttatgaggaggtcgtttttttgatcacgatttctacacggcggttttctttcatatgtccgggacttttgttgtccttcacaggtttcgtatccgcatacccggcagagataaaccgtttggcggaaaagtcttcattcgcggtaaaatactggatcacactcgccgctcttgcagacgacagctcccagttcgacgggaattgataggtggaaatccggcggctgtccgtatggccttctacctgtatgtcattcggaattgtttttaaaagcaccgcgatctgatgcagaaccggctcggcgtttttcagcacatccgcttttcccgtctgaaacagaacggcctcctgcagcacaagaaccactccgcgctcatcgcgcttcgccgtcaatttggaactcaaatgatgcgcttttatgtatgtcttcacgttttgtaacagcaaatcctgttctttattttcgtttgctttgtctgatgacgccggttcacctccgctgccgtttgtatgaatcgatgaaacggcagattgaaatttttccgcgtctatttgcgacatcgaaaaaagcaagataaagaacacgagaatgagcgtgatcaagtcagcgaacgtcaccatccatctcggtgaaccgccggaatgttccggtttgtttcttctttcaaaacgctcttttctaagcttcatggacagcgccctttttcttgttcgcaggctgtcctttacgccagtcttctcttgagctgaagacgacgagctgactttcgaggttgcggggatttttgcccgattggatgccgacaaccccttcgatcatgacctgtttgatgaaaatttcactttccgttttttcttcaagctttgccgcgattgggataaacaccaaattggcaagcagcgctccgtacagcgtcgtcaatagcgcaacggccatgttcggtccgagggtatgcgggtcatttaagtttttgagcatgagaacgagtccgacgagcgtcccgatcattccccaggcgggtgcgaaatcaccagctttttcaaaaacgcgtcttccttttctgtgtctttcttccattgcggcgatctcagaatccatcaccagccggatcgtttcctcgtcccagccgtcaatcgcaagcaaaagccctttttttaaaaacggatccttgatctcccgcgcctggtcatccagagacagcagcccctgcctgcgcgcctgctccgaaaggctgacaaatactctgacaagctctttcacattgtcatcctgacgggagaatacctgtttcagaacagaaggggttttctttaaatccctcggcggaaagctgataaagaccgccgcggcaaggccgcctgtgacgattaaaaaagaagtcagatccaaaaatgaactgattcccgccagtcccgtccctgacagaataccgattgcgacaataatacagcctaacataaagccaacgggcgtcagataatcaaaacgtttcatatcttctccttactcaagtaaaaaagcaagattccacccctcagagtgaagcttgcttttccgtttttttatgacttggttgattgtcttaattcgatgcggtgaggcaattcgacgatatgctcttcaaccggctctttgttcatcagttttgtcaaaagtctcatcgccacggcgccgatatcgtacgtaggctgcacgactgttgaaagctgagggcggaccatcaggctcaatctcgtattgtcaaaaccgataatatcaagatcatcaggtatcgaaagaccttgatcttgggccgcatggataatgccgagggccatttcatccgtcgcagaaagaatcgccgtcggtttccggtcaaggcccatcaagctttgaagcgcctccataccggaatcataagtgtaatcgccttccgctacgaattgctcgttaaacggaatcgccgcttcttcaagcgcccgtttgtacccttgcagttttttcgaacggttgatcggctcttgcatcggtccggagacgaatgcaatatcgcgatgccctttatcaatgaaaagcttaacggcatcataaatcgcctgttcataatcaatggcgacagaaggcgtctcgccctgttcttccactgatgcagccaagacgatcggcacaggagagcgcttaaattcttcgacatgctcgtccgtaatgttgccgcccataaatacgataccgtccacttgtttgccgagcatcgtatttaacagatgcagttctttctcaagattttgatccgagttgcttaagataatattatatttgtacatcgtcgcgatatcttcaattccacgcgcaagttccgagtagaaaatgcttgagatatcagggatgatgacgccgaccgttgtcgtttttttgcttgcaagccctcttgccaccgcgttcgggcggtagccgagccggtcaatggcttccaatactttttttctggtcgtcggttttacattcgggttgccgttcacgacgcgggaaacagtcgccatactgacatttgcttctctggccacatcgtatatcgtaatgttgctcactgaaaccactccttttactggatacacttatccttatctatagcataaacactttatgtaaagaaatgtcgtacgatttcgcattctgtcgtttatgattgtaagcgtaagtcagtagtgtacattatttttcattattcatcaaatttaaatatctctcatgaaattatacacgtttttcccaatgatgaaaacgttcactttcattttataattaaataaaatgaagatacgaaaaaaaagccgcgcgaggcggcctttaaagagcggaacgttgtattatgcttttactttcagcatcggctttaattcgttcagccatttctcgaattcagggatatccatctgctgcgcagagtctgaaagggcaacggaaggatcagggtgtacttcggccatcacgccgtcagcgccgatcgcaagcgccgcttttgctgtcggaagcaggagatcgcggcggcctgttgagtgtgtgacgtcaacaaacaccggcaagtgagtttcctgtttcaaaatcggcacggcagaaatgtcgagtgtgtttctcgttgccgtttcgtacgttctgattccgcgctcacaaagaatgatttggtcgtttccttgtgacatgatgtattcagctgcattgatgaactctgaaattgttgcggcaagaccgcgttttaacaataccggctttttaacggaaccggcggctttcagcaattcaaagttttgcatgttccgcgcgccgatctgaatgacgtcaatgtaatcaatcgcttgctcaatgtgggcgggcgttacgatttcactgatcaccgcgaggtcatattcatcagcgacgcgtttaagaatttgcaggccttctacgccgagaccttggaaatcatacggacttgtgcggggtttaaacgcgcccccgcgcaggattttaatgccttgttttttcgctgcggccgcgacttcggcaacctgctcatagctttctacggcacaaggtccgacgatgaatctctgatcgccgtcaccgattttttcacctttaatgtcaacgatcgtatcttctgcttttttcttccgggagacgagcaacgctttgctgtgatcctcttcttgaagttcaagtccggctttgaaaatttctttgaaaatatgctggatcgttgagttttcaaatgggccgtcattgctttcaataatgcggttaagcattgtacgctctctgacagggtcaaatcggttgacaccctgtgcttcctttgctttaccgatttcttttacaacggctccgcgttcattgattaatttaaggatttctaagtttagtgcgtctgcctgctgtcttagactctctaattccttgttgctcatctttttcatcccttctatgctatgttttattttaatggttaacatgcatcttactacagttatgcgaaaataggaatatgaaataataaattttttcacattcgactttatcacaaaaacgcttttaagcttttatgcgttgaagcagtatatattgatatcctacatgatccggctgaaatgatcaatagtttttttcaaaaaaaaaccgccggtatcaaccggcggccagcaattatgaaaggtgctgctctattgcgttttttgtgatttgtgaatgagacgcgtgccatttcacttcgccgtttgtaataacgaatacttgcgggctttcatgtttcacgccgtatgcctcggcgatatagtttgaaagcggccggctgtcctgcacatgcaggtaataagaaggtacttctgaatgctccgatgcaaaggcgtcaaactcctgaaacgcggcttggctgatcgggcaggttgtgctgtgttttaaaaacacgagcgtgttttctttctcagcggcatttttgaactcttcttcagacgatatcagctgttttgtcatgtcggttatctctccttattgaagatcagcgatttgcctgaccggctttttccccggcgtcttccgcttcggccttgatgctttgggccgtgtcctgcatttcgcttctcgtctcttcggctttctcggttagtgtgctcttagaacggtcttttaaatccttcactttattcataatctgacctgactgatcagctaccagctgggtgatattagatgttttgtccttggcgatgctgacatattgagagcctttttctttcgcgtcggccgtcattctgtccgtcttatcctttaacgcagaagcctgactgccgagatcgtcgcgcagctccttacctgatttaggcgccagaaacaacgccgttgtcgcgccgataattcccccgatcagcgttccgattaaaaaatccttactattgattccatctttgctcattatgattcctccttagtggatttttcttatgattaaagcgatgtttttttcttttgcttccacttgtcccatatttccatagcggcctggctccaggtgacaacctgactgatcttatcctgattctctcttacagaggccgtaacagaacctgctgcctgctttatggatgtattaaactgctggacggaagttcccacttcctggacagcatggacaaccgtatttaatttctctgatttttcctgaatgtcttccgcgagacggtttgtcttatgtaacagctcggttgtctctgcggtaatgcctttcatctgcccttcaaggccgtctaaagtcgaggctacgtttgttaaagtcatctgcacggactttaatgttttggacagatagatgacgaggatgagaaatgcaacggcaatgagtgcgacgcttaagtaaagaatgatgatcatctaatacctccttaatgcaggatatagtggtatatacccaattcttaaaatgataaacatatatgaaaggtctgtatgtatactatttctccgtttatcggtaaatccctttgcagcacgcgcaaaaaagcagtgagagccccactgctttttcgttacgctatgacgttttcataggccctcatatatttttgaatgtctccggcgcccatgaagatcagtactgcgccttcatgcgcttttaacacggaagtgtcattttcttcaatgagttctgcgttatcgattttttcctgaagatccgtgatcgtgagcttgccgacgttctcacgggcagagccgaaaatgtcgcacagatacacgcggtcggccgcgcttaagctttctgcgaattcatccaggaatgattgcgtccgtgtaaacgtatgcggctgaaataccgcgatgatttcacgttcgggatatttttggcgcgccgcctcaatcgtgactttgatttcagtcggatggtgggcgtagtcgtcgatcagtacctggctgccgatcactttttcattgaatctgcgtttgacgccgccgaatgattcaagtccgagcttaatcatgttcacgtctatttcttcatagtggcagagcgcaatgaccgctaaggaattgaggacattatgatggccgtatgccgggatgtagaacgtatcgtaaaacgtattgcggacaaagacgtcaaatgtcgtgccttccgtattttttacgatgtttctcgcttgaaaatcgttttcttctcccgtgccgtaataaacgacaggcacattggcgtgaattttcggcaggtactcgtcatcaccgcaggcaatgatgcctttgttgacttgaagcgccatgttttggaaagcatcaaacacatcgtcaatgttggcgaaataatcagggtggtcaaaatcaatattcgtcataatcgcataatcaggctgatagcttaagaaatgacggcggtactcgcaagcttcaaatacaaagtattcgctgctttcatttcctctgcccgttccgtccccgataagaaacgaagtcggcttcgcctgctgcatcacgtgtgccaagaggcccgttgtggacgtcttgccgtgtgcgcccgttaccgcgacacttgtgtattttttcatatattcagctaaaaatttatgatatctgatgacaggaatcccttcatcgagcgcctttgcaatttccggatgagaatcagggaatgcgtttccggcgattaccgttaagccgggtttgatgttatcggcgctgaacggatagatcgggatatttcttttttcaagggcagcctgagtgaaaatctgcttctcgatatccgatccctgcacctgataccccgtatcatgcaggatttgagcaagcgggctcatacctgtcccttttattccaacaaaatgataaacagtcataatcgtacctccaacaaacgtctatctgttccccagtatatgacgctcatttcattttgcgaccgcagcgggcgaaaagcccgcacagcggcgcttccatttatttttacgttatcgtcagtatctgtaactttctttttgattaaacctgccgcatgatatttcagcgcgtgacagtgatgcagttttgatggtccatccactatcataccatgtttgtgagaaaaatgaacgatattcttattcttgagaaatgtcagcggccgtaatcagcacttcacgcggtttgctgcccttcgcttctgagatcatgccttcggcttccatcatgtcaatcagcctcgcggcgcggttataaccgattctgaaccttctttgaaggcttgaggtgctggcgctgttttgctccacgacgaattggcacgcctcaggaaacagttcgtcttcttccttaagggcggttccctgcctgatcagttcttcctgttcaaacaaataagaaggcggcagctgctttctgacatgagagacgacgcggtcaatctctctgtcggatacaaagttgccctgcaggcgcaccggttttccggtaccgttttcccagtacagcatgtcgccttttccgagcagcttttccgctcccgccatgtcgatgatcgttctggaatctacctggcttgagacggagaatgcaatcctcgtcggtatgttcgccttgatcattccggtaatgacatcgacagacggacgctgtgtcgcgacaagcagatgaatgccgcaggctctcgctttctgcgcgattctggcgatgctttcttccacatcgttcggcgcgaccatcattaaatcggcaagctcatcaatgaccactacgaggtaagggagcttttcgcctgtcttatgatcggccgttaattcattaaagcgtccgatatctctcacacccgaatgggcaaacagttcataccgccgttccatctcttccacaacccattttaacgcggcggtcgcggctttggcgtccgtgatgacggggctgaccaaatgcggaatttggttataaggcgcaagctcgaccattttcggatcaatcagaagcattttgacatcactcggatccgccttataaagcagactgaccaaaatggtattgatgcagacgctttttcccgatcctgtcgcacccgctatcaacccgtgcggcatctttttcaaatcaatgacgaccgggtttccggaaatatcgacaccgagcgcggctgtaagcggagacggattcgtcctgaaagcggcgcttctgatcatctgccttaaatcgacgactttgcttacgcggttcggaacttcaatgccgatcgtgtttttaccggggatcggcgcctcaatccgaatatccttggcagacaggctcagtttaatatcatctgctaagtttgtaattttgtttactttcactccgggctcaggatgcacttcaaaacgtgtgacggacgggccttgtgtgacatgaacgacttgggcgcgcacattaaagtttttcagtgtaacgtttaaaagctcgcgctgttcttcaatccacgattggtcgtcatgtctttgcgccggcggtacgtccagaagcgacagattcggaaagacatagctcgctccgccctctggcgtcttcgtctgcttgtgtttatcgcttttaagcatcatgacgttaaacggaacattgcgctctttcggctgctccgcttttctcacagtctgaggctgtccgtgatgctccgttttttcttcggcaggccgggatggggcatcggtcgtctcaatgcttacaggttcaggctcggggtctgaatgccgctctgcttcattgtactcaggctgagagtctgcttcctgtttcgcgtcgggttcagctgattcgggcttgtcttcagactgcggctgaatttcctcgtatccgggttctgtgtatgtatacaccggttcttctgcggtttcaaaaggcggtgctttttccggctcaggctcctgatgttccccctccggcgccgcttgttcctctgtgttttcagccgttcgggatgcttcagactcaggctctcttataggctgcgggcgggtttgttcatgctcttgttcttctgtaaagccggcagactccgcgctttcggtgtgctccagctcttcagcctgctgcggttctggtgctgcaaacacttgctcttttgcattctcagcctccgtgtgaagctcctcttttttaacggccggaatttcttccgtttcttgtttcgcaaacggttctggccggtcattcgtctgttttgttataccggatgttgtgaagacgggctctttttccgtttcctgaccggattttggcggaacaaattgctcctctgacagcaatgttacgttctcttcacgccgcttttcggaaataggcgcttttttgatgctgtgctgagattgaaagccgtaaaccggtgaaggaatggatgacggtttaaagggctttttcaccgtatcaggctctttatgtgtatgctgtttccgctccgtttgctccttcccggcggcataaccccgggacggctggcggcgttcgtgcctttcccgctgtctttggttttgctccgttcgcttatagccgtccggaacgaccgggaagcggaaattccctttcggatattcgtaatatattttagaatcttccatgcgcgttaatttgccttctggctgatccggtatttgctgtttctggatttgggcatgcgtgttcggttcacgttcatgctcttcttctttttcacctaaaaataagtcaaaaaatttattcagccaactcatgtttaatcactctctaactccctttttagtagtctgggacgatatttagtataccattgccgggcggctcagaaaagattaagctcccaactgaagaaagccgttaagcaggcctgcttaacggctttctctcacatcattcgattctgtgcgcttatttatgggagttagaattgaaatgcttcgccggcctcgcggctgtcttcaagaacaagaatccctttttccgccggcgcatccggcaaagcgagttctttcgcggagcagatcatgccgcttgacggaacgcctcttaattcagcgtctttaatcacaagtccgctcggcattaccgcaccgactttagcgacgacgactttttgccctttgtccacgttcggcgcgccgcaaacgatttgaagggtttcctctccgacattcacttggcagatattcagtttatccgcattcggatgtttttctttcgattcaacgtgaccgacaacaaatttcggagaaaggtcaaccgtcagcgtttctgaaacgccgtttctgttcagtatttcattcacatcctgtacgaaagtctcagacaaagcgacggggccgttgtcttcaatctgtaagtaagaagacacgttaaaaatgttaaagcccgtcgtttcttttgtttctttgttaaagattctgacgacatcgccttctctttcatagccgatttcttcgcgtgctgcatctttaagagagatcagaagcgtatctcccacaccttctttattgtaaaaagcgttcataagaaaaatcctttctaatcctttttcggccggcttttcgccatgataaacacaggttccagtctgccttcattatacagaaatgaaagggccgtaatcggcaccgtgccgcttgcaaagaagctcatggacatttgccctaaaatatcataacccgattcatttcgaatgtcagcaagtattaatacatcctgatgcgggacggaaatcgccaattcgccttcagcggcctgcttatattcatgaagaatcgaatcattgagaatccggctggcgtcatagccgtcattcgccctgaaaaaataaaaataattatccgcaaccgtatcctgtttcacgaccgaaggaagagagcggagattgaatgacgccgtctccctgatccgttcttttgtccagttttctttctcgagcatacggctgtcaattaggcggtacgtcttgccgaggtcaagcgcgtagtagattctcgtttcggccgtatggtcatcatacacgagcggaatgccgtcgctcgtttgatcgggaaatgacgtggagcggatgaccggatagattccggcttcctttccggacatctcctgtccgcttccttccatcgcctccatcgcttctgacacatagtagacgatttcgtcgatcgcttcttcttttttcgtctcccacttcgcaatgatcggcgggagctccaatgtgatgccttttttggtcgtttgatcctcaacacggagggtgtctttttctctgtcaaaaaagaaggatcggttctcgtgctgcaggcgctgttttaataaatccgccagcttccttgacgtcattttcaaagcccgtggcctcctttatgctttagcaagggaatcggttaaaaattgctcaatttcttcttttgttttacggtctttgctgacgaagcggttcacttcttttcctccgttaaacacaacaaagctcggaatgccgtaaatttcccattccgcgcatgtatcaataaattgatcgcggtctacgtagtaataagtgaattcaggaaagtccgcttccagctcagggagaaacggctccacaaagcggcagtccgggcaccaatccgctgaaaacataaataccgcccaatcgtcttgtaccgctttttgcaattcttccgtgctttcaatctttttcattgtcattcctccatctggattatgagttttttatatgctgatgtttgtccaattggatcataccagactgtttacggcaagaccaactatatgcaatatcattatcatatttcatttgcattatcaagcaagtttcgtttaccattttgcttgtagccgtacgaaaatctgaatatgtacataaggaggggcaaaagatgcagtttgtcgtgtatttagcgggtgaaatccacagtgattggcgggatgaaatcaaacaaaaagcaaaagcgctgaacctgccgattacgtttgtcggtccgatggaaaaccatgaacgctcagacaatatcggagaagagattatgggcgtgcagcccgattctgttttaaaagacgccagagcttctgatatcaacaatttccgtacagaggtgctgatggaaaaagccgattttgtgatcgccctgtttggcgagaaatataaacagtggaataccgcgatggatgcttcttatgccatcgcaaaaggaaagccgctcattctcatccgtccgaaagaacttcatcatccgctgaaagagctttccggaaaagcgaatatcacggtcgaaaccgtcaatcaagcgatgaaagcactctcttatttatttgaaacagaataagcaggccgcttttatgcggtcctgcttacctacactcaccacttcagtattaatcagttcaagaggaaagtttatatttgtcttttttgtcataatcataccttcttgcagaacaaataaaaatgcaaatgactcgactttgtgaaatcgctgctcctctcaatgcttgcagcatgtttttgatttaaaaacgtttatcattgcaataaaggttcgaaggttgtttatctggatcggaaccattttgataataatattgaaaaataatatgtgttacctaattctatttacaatacgctttacacttatattcacaacaaagaactgtctcgatcatgcggcttaaaacagaatgtaaaaacagcagtcaataagtattcaaagggacttattgactgcttattttttttacacattttctctgatcgtttcgaccgtctgtttgtcactcgccatgaccagcttaatgagcatttctttcgccgcggcataatcatcgacatggatgatagcggcatttgtatgaatgtatcttgaacaaatgccgatgacggcagacggaaccccgctgtttgatatgtggacgcgtccggcatccgttcctccgcctgaagcgaaatattgataagggatattgtgcgtttccgccatatcaaggacgaactctctcatcccgcggtgcatgaccgtcgttctgtcgagaatgcggagcagcaccccctcgccgagacggccgaacagctccttatcgccgctcatatcatttgccgggctggcatcaagcgcgaagaagagatcaggctgaatcatgttggccgctgtctgcgcccctctcaagccgacttcctcctgaacggtggccccggcgtacagattgttcggcaggtcttttccgtgcagctcttttaatagttcaatgcttaacccgcagccgtagcggttatcccacgctttggacaatattttcttctcgttggccatcggggtgaacgggcagaccggcacgacctgctgtcccggtctgatccccattttgaccgcgtcctctctgtcatcggcaccgatatcaatcatcatatttttgatctccatcggctttgcgcgctgggcatccgttaaaatgtggggcgggatgcttgagatgacgccgataatcggtccgttatccgtctgcacctcgacacgctgggcaagcagcacctggctccaccagccgccgagcgtctgaaatctcagcatgccgttatccgtaatctgtgtcaccataaacccgacttcatccatatgcccggctaccataacggtcggcgcatcttcagcgccgcgccttactccgaaaacacttccgagtctgtcctgcacgatgtcatccgcatatttcgcaagctcccgtttcataaaagagcggacctgatgttcatttcccggtgcgccgggaagctgcgtcagcgtccggaaaagcgttttcgtttcctcattcatattttcccctcatttctatgtaatgcttttattttattagaaaaacaaccgttttccaagcgctcagattgaatgggctgtaaaaccgccgctttacttaacaccgtctggcatcttctgtataataaaaactacgacataattggaggtgcttcatattgaaattacgtcattttctcttaggtgcaggagtcggattatgcgctgccatcgcagtgaaaaagtatgcgatgaaaccttatatctcttcagaaaaagcgctccgtatcgtgaaagcggcttttaaacagcgcgggccgatagacggatcatggatttacacagagccggagccctaccaggtaaacggagaaaccatccaggtatacaaaaccggcgtgacacgttcggcattcggcgaactggagcaatatgaagttatggtcaatgcaaaaacaggccagattgtcgatgtcattgattctgtcgcctcataattcggacaagcaaaaaataaagcccaaaaccatcagcgttttgggctttattcggttacatcggccgaattcgtttatatacggggttccacatcgcgtcctgaaccgcttggatcagatcctcgggttccgtttccgctacaccgtcctgaatcgcagctttagctacagctaccgccacggttgccgataccgtcctgagatcctccactttcggaagcatcggcgcgcccggcttgccgacgtccaccataccggcgatggcattcgcgcaggcaacgaacatattgtccgtaatgagccttgcttttgtcacaatcgttccgagcccgagtcccgggaatacgagcgcgttgttcgcctgtccgatatggtaggtaacgccgttatacgcaacaggcgggaacggacttcccgttgtgacaagcgcgcggccttccgtccatttaattaaatcttcaggttttgcttctgataatgtcgtcgggtttgacataggcaaaatagccggccgtttgacatgtgaggccatttctttgacgatttcttccgtaaatgcgcctgaaacggtagatgtgccgatcaggatcgtcggcttggcctgtcgcaccgtctccgccagatcaattgatccgccttcaccgctgcggccgtactctttcacttcatcagcagggcgggcgtacggaacctgaaaatcacgcaagtccttcatatcatccgtcaacaatccgtttctgtcgatacaccaaaagcggctgtatgattcttcttcgcttaatccgttatgcaccatagcttcgcgcagctgctcagcaattccgataccggccgttcccgcgccgaagacgacgactttatgctcttttaaaggcacttttgatgctttcgcacacgctaaaacagctgcaagcgacaccgcgcctgttccttgaatgtcatcgttaaacgtacagactttatctttataccgttttaatatgccgcgggcgttagccgtgccgaaatcctcccaatgaagcagcgcattcgggaatgtttcccgggcaagcgagacatactcatcaataaagcggtcatatttctcgccgcgcactcttgaatgttggtttccgacatacagcgggtcatttaagaggctttcttgatttgtccccgcgtccaaaacgaccgcaagcactcgtgacggatcaattccggcggccgccgtatacaccgcgagttttccgacagaaatggcgatgccgccgacgccccagtcaccgattcccagaatgccctccgcatctgtcgcaacgatcaagtcaatgttttcattttttccgaactgctgaaatgcggcgcgcattccttcagggtcatctattgacaaatacagaccgcggggttttctgtactcgtggctgtaacgctggatcgcggtgccgacggtcggcgtatatacgatcggcagcatttcgcctaaatgatcatttaacagcctgtaaaataatgtttcattccgatcatggagagcggtcaagtacacatttttgctcagctcatcaggctgcgaactgaattgttcgtaggcccgcctcgcctgctcttcgattgtcaatactttcggcggcagaaatccctcgagcccgagttcctttctttcctcctgtgtaaaggccacccctttatttaaaaaaggcgtagaaagcacttctaatccgcgcagagttgttttgatttctccatctttcgtcacttgaaattgattcacctgtctcttcctttcaaagcaatttgtcttaggtttgcttttattcccgaaattcatacaggtaaatcatcgatccgcttattttctctcccgtttgacagatgcagccacttcgccgtcttctccccattttaccgctctgtaaatcgcgtcgtgatagaaaatcagccaggcgcctttttctgccgcgaacgtctgccatttctgcttttgcggaatggaggtcatcggataatcatcataggccagcacccataacggatttttatgcgcattcgtcggcatcaggtcggcaaaatgcacagccgtctccccgccgtcttctaagacgatgacactgtggccgtcgctgtggcctccggtgtggtgcatcgtaatgccttctgtcagctgatactcgttctcaaaggtttcgacctgatcttgtaccgcctcccaattttctctccaatatgtatttttcgatctgatattagggtttctcatttcgcgccactctgttgcagaagtgataatgcgggcattcgggaaaacagagacaagctcctctccgctgtattccgtcaagccgcatgcatggtcaaaatgaagatgggtcatcgccgcaatatgaatgtcctcacaggaaagcccgagttcacgaagagagtgttttaaattggattcctgtgttacaccgtaattccttttttgtttatcagaaaatttccctctgccgatacccgcgtcaaccaatatattcaggccgtttgttctgatcagaatcgggtctgttcttaattcaatctggtttttgtcatttacggggtattttctcgaccataaaggcttcgggacaacgccgaacatcgctccgccgtccatatgtgttacaccgccgtccagccatgttaatgaaatattcccaatattcaatgtctccatcttgatccctcctgatataatggtagcaaatggcggcataaaaaaacagactcccgcatcagagtctgtcttttgttctccattcaacttcggcccggtaaatcggctggccgagtgcggagaatttttcttcgtattctgtcataatattgcccttcggatcgctgttgtgcagatctaggctgacttctgtcagaagcaggccgtattcggaaaagcttttcagagagtattcgaataaaccgcggttatcggttttgaaatgaatctcacctgtttcgcccatcacttcttcgtattttttcaagaacgttttaaatgttaaacggcgcttttcgtgacggtttttcggccacgggtcagaaaagtttaaataaacgcgcttgatttctccccgttcaaatacgtcattcagtgtttccgcgtctatatttaacaaacggacattatgagccccgctgtcctttactttttggacggcagtgacgatgacgcttttaaacagctcaattccgatatagttgatatccggattctgcttggccattcctgaaatgaactgcccttttcccgtaccgacttcaatatggatcgggttgtcattgccaaagaccgtattccaccgccctttatactgggccggatcactgatggcgatgtcagcgttttctgccagaaaatcattcgcccaaggtttatggcgcattctcatatgattgacacctctatctataatttcgagtaacaacataccatgaaacataaagagccgcaagcgccttttaaaggcgccggccgcataaaaaaagaggctccccggtccggaacactcatgtgatgcataaaaccgcaccgctttgcacaatgtatgacacagaaaggatgtgtatatgaatcatgggcttaacaagcgaacatcaggtccggttattaaaggacatattggccgaccatcaattggattgctgcggcacggttgccgagtatgaacagctggagcgcgtcatcaaatcactgatggccaacaccgggcttgattcaaatataaaaaacgtgctcgaggatgtctaccgctacagccagtccggcatcacggccgattccatcgacacgcatattcaggagcaccaaaaccatttgtcccaatgggtggagcagatggattcgtactcctgactacttgacaatccgcttcatcagggcatgaagctcttccatggcatcatgatacgctttgtcgtttccttttgatttgtgccaggcgatgaaggtgatggtctccgataacatgtaccacgccatccgcagccgaagcccttccgtgagcttcatgccgtacatcccaagccagctgtcccacgctggctcttcgacgtaatgatacaataaagggccgagatccatggccggatcggctatcatggcgccgtcccaatctattaaatacagctggttgtcttcagacagaagccagttattatgattcacatcacaatggcaaacgactttttcaccgaattgcacctgatccacatgagcttccaaataagcaaggccttcctgaataagcggcgaaaattgccgcacggcaaagacggcctgcttcagctgcgacaaaagggcgcccggatcaagcggttcttttcccaatcttttcagcatgtcgagcaaagcttttgatgtgtggattttgcggagcagctcagccaccgggcgtccgctcatatcctttgccttcagctccctgcccgccatccaatgctgagccgtaatgacgtctccgttttccatccgttttgtccaaaccagcttcggaacaatgccttcggcggataacacggctaaaaagggcgagctattacgttttaaaaaaagctgttggccgttatgtttcgcataatatgcatctcctgtagctcctccggcggggaagatctcccaatcgctacctagtaattgtcccaaccagttcatatcaatgttcaacccatcatttcttaaaatattttagaataggcctccagcctttctctattggcggagcggcctgtcataaacaatttcatgagaataaaaaagacagctattgagagtctcatatgctaatcaatagccgtcctataaattttagcgctacagcacaaacttcgtcaagcaaaactagcaagaacacctgtgaattctgaagatttatgccgcgaaccgctctgttgccgtgaaacaattgacgggtttcatttgtttattatgtttttattttcaatggcgcaccgcccggcataagccgaaacggcgtcgttccgatcagctcgccgtcagcgtgaaacggaattttcccatctgtttcaaaaacgaattccttcccctttatcatcgtcactccgtccattttgatatgccggccgaagctcatcgcccataaaaaacgatacagcgaaaaaaaggacaggttttctgcaatgacaatatcaaaatagttttgacggggatttgctgaaggcgccgctttcatgccgcctccgtaataagggtgattagccgcaataacaaaccagacattgcggaattcacgtctctggccgtctgccgtgcaaacaaatctgaacggctgaaaccccgaggccgtatgtaaatgcgcgagcgggtaaatcacaaagccgagacgcaaaaaccgaagaacgcgcgaaaacggaaaattcgcggctgccttcaaaactgaggcatcgaagccgacagacaggtggttaataaaatagagtgattgcgctttgtcatgaaaaaagttgatgtttcccgcaaaaaatttccgtgtgagcgggcggtgcagacttttgatttcttggaggagcgccgacttcttaataccgagccctttggaaaagtcattgtacgaaccggcgggcacaaaggtcagctcaatctgatccgttcctttcagtccgttaatgacttcatgcatcgtcccgtcaccgccgatgacgaacagccgcttaagcttatgatcctgcatcattgaaatctgtcttgccagcacctccgcatgtccgggatgcccggtcaaaaaagagcggtggctgaccccgcgcctggtcagctctttttgaactgatttccagacacgccggccccgcccgcctcctgagaccggattaataataaaaaaccattgactcatcgtttgttttcacctgcttcatagatgaagagacagccggcaaacgtccgctttaatcaagccattcctgtctccggcttgaatcgctcaagccgtaagacaaaagagccttcgccgccttcagctggtggtgcttgatcggcgccgtatttttctgctgcttttccagccaccctgccgcagtccgtttatcagctatttccagcccgtacggcggctccgggtaatcaatataagacgttctgctgagcaaaagcttccgcacgggaatgtcggcctgcttttcttttacgatttgcgaaacgaccgagcccgtccggtgcaggctgagagacggattcaatacttggcgcgtgctgccggagcctctttcttcccaaaaacggtgttttgatccgatatatacactgtcctcttccgcttccataaaagcggcgcagaaaatctccagcggcgagatgatgataatgctcagttcgacggacgcctgctgaatttgcagaaccggatgatacatcacaaaataggaatcgggcagtttttgagccagcatttttaacatcctgtcccttttgaccgcctgcgaaagctcagacttttgagaaagcgtggagctcgcccattttaattgaaagtcatacagctgatctttgaaaaaaggcgcgagctcagacttttgagacggaagattcccgaacagcgcctcttctccctccggttcatcaaaccattggtgcctcttttcatttatatcggccgtattttcttcttttctcttttttaaggaaaattttttcctggccggcgcttgatcggtttccccgccggcagccgtttccgtttcttccgttatccggtcaaacgcttcaagaagcgcctcccagcgttctttcttcagccggataaactggttcatataatggtatggatcaagttcatatctggatatgcagtcgtgaattttgatgatctgtgccatgtgatttctccactccgaatatttgtttatgtcaattgaaactgtgcgatttcttcgtatttaggcgaccggtcaagatgggtctgaaacagggaaaacctgctgacggcactttgcaccctgccgctttcaaacggcacatcgtcagaaaacggccggtctcccgcccacttccgcgccatcgtcatatgagggtgatacggccgtttttccacttgaaaaccggctttcaaaacagcctgttttgttttttcccgcaaatcaaagagcagttcattccgttcgggctcaaggtgaagcactctcggctgtctgcggtcgccgaaaatatccagatgctgaaactgtacggtaaacggctgcgctgccgacgcagcatctgcgagcagagacgataatttcgcaagccgttcttcatccgcggctccgagaaaaatgagcgtaatatgatagtcatgcgggtgcacccattttttgaatgataacgccggctcctttttggctgcttcccaaatcggttcagcaatgtcagccggaatcggaatgccgataaaataatgcggcaatgaagctttcatacgaggatctccccctctttggttatggtgttattataaaacggataagcggagaggagaaccctgtccgctcattatgataggatattatgtaccgaacgttttatacagaaaggaatgagccggccttgaaaatcgtaaacagcacggcggagctgatcggcggcacaccgatcgtaaagctcaatcgccttcagccagaacatgcagcacaggtctatttaaaattagaatcgtttaacccgagcggcagtgtcaaagacagagcggcttacaatatgatcattgaagcggaaaacagcgggcatttaaaacccggctctgtcatcatcgaaccgacaagcggcaacacaggcatcggcctggcgatgaacgcggcggcgcgcggctacaaggcaatcctcgtcatgcctgacacgatgacgaaagaacgcatcaacctcctgaaagcgtacggcgcggaggttgtgttaacaccgggggcggaaagaatgcccggcagcatcaaaaaagcgaaagaactcgccgaacagattccgggaagttttatcccgatgcaattcgataacggcgcaaatccagatgcccaccgaaaaacgaccgccattgaaatctatcaggccgttcagcagctcaacagaccgctcggtgcttttgtggcaacggcgggaacgggcgggaccattaccggaaccggagaaacgctgaaagagcttttcccggatatgattgttcatgtcgccgagcctgcgggatctcccgtcctgtctggcggaaaacccggcgctcataagcttgtcgggacaagccccggatttattcccggcatactgaatcaggacgtttacgatgaaatcatgaaaatatctgatgaagatgcgtatacgacaacacgtcgtctggcccgggaagaaggcatactcgtcggcccgtcttcaggcgccgcctgcttcgccgccattgaaaccgccaaacgcctccctcccgaacagatcgtcatctgtatgacggccgatacgggagaacgttatttatccacggatttatggtcatttgaatgataaaaagggatgccgctttcggcgtccctttttattatcacttggcaagttcataaatggcttcggcatataaagccgttgacctgagaaggtcatcgatttcaatgtactcatccttttgatgcgcgctgtcaggccggccggggaacagcggaccgaacgcgacgcccgccgaaagggatctcgcatacgttcctccgccgattgaaatcagatccgctttctttcccgtctgtccttcgtaaaccttttgaagcgtctttacgagcggatgatcggcagaaacgtggtgcggtttgctgtctttaaattcttcaagccggaattcttcagcagacgtaaaagcatcacggatgactttgctgtctgaagtgacgggataacggatgttgatgccgagttctccatcctcaccctttctgtatgtaaaggtgccgacattcaatgtaagctctccgctgatgtcatccctgcaatcaattttcagctttttgcctcgtgtatcatttaaaaaatagtcactgacggttttgacaaagtgctttccggctccatccagctctgttccgttaaggcattcagcaagctttaagccggcattgataccattatccggttccatcgcgtggcatgatttcccgtatacccgaagcgtcagttttccattttccgaaactgcttcaccttgtgtttttgactgctcaagccatttgctgaaatatgcgtgcacggcatcaataccgttcccttcaataaccgcttcagccgcatccggcaccatgttcaagcgcagtcctgaacggaatgacagaagcacgttttttgcgtctttgtcagaagcgttttttacaatgcgcagtgacgcatctataattcctttttccgcgttaatgatcggaaaatctgcgtcaggagcaaagccgatgtcaggcattttttcgtgtttgaagtagtgatccacgcatctccaatcactttcttcatccgttccgatgatgattctcacgcgtttggataaaggaagctgcatgtctttgacgattttcagcgcataaaacgccgccattgtcggccctttatcatcaatggcgcctctggcatatatccggccgtccctgatatcggctgaaaacggatcgctcgtccagccgtctccgggcggaacgacatcgacgtggcacaaaacaccgacgatttcgtcacccgttccccattcaatatggcccgcatagccgtcaagattctttacggtgaagccttcttttttaccgaattccagcagtgacgccaggctggcattgacgccttctccaaacggccggccgggaccggctgttgattcgtccattacgctgttgatctgcaaaaacttctgcgtgtcacggatcagatcttctttgtttctgatgacttcaacttcccagttcatcacaaatcccctttcttgataaagacttgcaaaatgtcgataaaacgaataatatagatgatgttttgaaaaaatgttcgtcattggaggtacttatgtttcatctcgacaagcatcaaacgacaataaaaagagaaattaccgcgggattgaccacctttttcacaatggtgtatatcattgtcgtcaatccggtgatcctttccaatgcgggaattccgtttgaccaggtgttcaccgcgacgattatcgcttccattgtcggaactttatggatggctctcgctgcgaattttccgatcgccattgcccccggcatgggcttaaacgcgtatctcgcctttcacgttgtcggcacaggcagcggcattacgtatcagacggctttcagcgccgtttttatcgcgggagtcatctttattattttatcgttaacgcctttaagaaaacaacttatagaagcgattccggacaatttaaaatacggaattacgaccggcatcggcttatttatcgcttttatcggcttacgccaatccggaatcatcacggctgataaatccaatctggtcgcactcggcgatcttcattcgcccgccgtcattttaacgcttatcggacttatcatcagtatcgtgctgatggtgctgaatgtaaacggcgctctgttcatcggaatggcgctgaccgccgtcattgcctttttgaccggacagatccattttgcgaaagggttcatttcatttccgcgcctgccggaggggcttttaatcacaaatccgttcggtgccctcggggatgtcgtgcatcacggtctgtacgccgttgtgttttcttttcttctcgttacgatttttgacacgaccggcaccatgatcggtgtcgctgaacaagcgggattgatcaaaaacaatcagctgccgaatgccagaagagcgctgttggctgattcaacggctacgacggtgggaagcatcttcggcaccagcccgacgaccgcgttcgttgaatcttcagcaggtgtggccgccggcggaagaacaggtctgacggcgctgacgattgccgttatgtttgccgtttccatgtttttcagcccgcttgtcagcgtcttatcggaagtgtccgcgattacgtcaccggctctgattattgtcggcagcctgatgatgggtgctgtgtcgaatatccgctggaatgagcttgacgaagcgttcccggcctttctcgtcattttggcgatgcctttaacgtccagtatttcaaccggaatcgcactcggcttcatttcatatccgcttgttaaagcagctaagaaaaaatggcgcgaaatccatcctctagtcctcatcttcgccgtgctgttttttattcagctttttattttgaacggacattaagaaaaatccctttccttttcggaaagggatttttacatataaagaacggaaagaatcgcggcaatgagacaccaggcggaacagatgatttgaatgacggttaatgcactgtttcgcgcccggaaatagtcatcactgtctctcttgataccgcttaaaaccggtttatccgtgatccggtcaaataaaagtgacgcggcatagcggctgacgatcgcaaataaaataaggactgccggcttcactaagagcggaagaacgagaataagagccgtaaaagccgcggttaaaaggtaaagctgccggagatacccgccgtttcggatcagcactttaaaaaacaattctttccacgccgtatacgccgaccgttttgtaaagatgtgctttgagccgggatataaaaacggcttgctccgccctttatttttaccattcgggagctgcacatcatggctgagcatcaaaactgaggcggcgagtgaaagcttccgcctgttctcctcaagcacttcttcctcaaaggctgataatgtctccgtccctttccaagtcaaaaaagcggaacagatgaacaatatacatcccgccggccaaagccaataccattcggcggcaaaggtgatcataaaaaacgcacccgccgtcagaaccatcactttcagccagcccgccgcctgattcccgaatgtccgcctgctgttttttctgtgccggtgcaccgctaatatcgcggtatggaagccgaacagacagcaaaacatacctgaatatgccggtaaggtacagtcaccgtactggcgccataagggaaataacaatacggcaagcgcaccccatttgataagggaaaggaacatcgaatacaaaagcgcgtaccgtttcagcttttgcatcagatgttttgcatgcaccaaaaacacgtgatccgcttccagcaaaaaggtatgaataaaacccgtgcacaacagcaaggcactgaatacatacagccagccccatcctaatactcctgccgctccattaagaagccccctgccgttcagccattcagcatattgataaacggcaaatgcggcagcgggaagaacgatgtacagcgcgaccgtccaatcaatgaccgtctgaaacaccttccattgataccgccaataatgaaacagcctttgaaaaaacaaagcccgcccggtcatcgctgactgctccgaaccgctgaataaaagcaatccagcagtgaacggctccccgttttttcctgaagctcctctaacgtgccttgaagaagcagagcgccctgatccagcaaataaaaccggtcgcagattttttccgccgtatccagaacatgcgtgcacatcaaaattcccgcgcccctttctttctcagcaatcagcatgtcggtaaacagcttcgttgagatcggatcaagtccgataaaaggctcatcaatgatgtaaatatccggcttcgccaaaaatgcctgtataagcatcatcttttgctgcatcccttttgaaaaaccggaaggcaaatcatgttttacagacgtcagcgaaaactcttcaagcagccgccctgcccgctcacggcactcttccccttctataccccgcaatgacccggtcagctcgaggtgctcccaaagcgtcagttcatcgtaaaaactcggccgctccggtatgtaagcataagatgaatcattccactcaataccgccttcaatatcccgggacagcccgagaaccgcctttatcactgtacttttccccgcgccgttcgctccgattaaaccggcaatttcaccagcgttgactgacagagatacatcggaaatcaccttcggcctgtcagcataaccggcgcagacaatgtttgcattcaataattctcccaaacttctcactcccccgctttcatacggacatgtataaaaaaagtttcagtttccataatattaaaagcggtccggacatagtaatgcaccaaggctgcacccatttggaaaaaattatctgcgcttattcctagattcatgtcgtccatatcgtgtataatggaggcagttaaaagagaaaaaaaacagaatgtcatcctttgttgcttattcgtacgaagttttagagtcgaaagttgtggtatatcaagtccatccgatcttatgatagggagtggttttttgaaaccttcaacaaatcgtatgctgactcggattaaatcagtttacatgttcatccaggaaaaaggccttgtgacaacacaggaactggttgatgaattcggcattacacctagaaccattcagcgagacttaaatgtgttagcatacaatgatcttgttcatagtcctagccgaggcaagtgggagacaacacgaaaaaaagtgaaaattacatcttaagcgaacaattacataaggcccttttcggcctgacatgctgcaaggcaaagcagcgtctttgccttgttttttgttcctctatataaaaagcccaaaacaaatctgttttgggcttttctgatatcgattacacttcagcgcctctcagcgtttcgagctcctcttcagtcagctcgcggaattctcccggtttaagatccgggtcaagagaaacagcccccatcgaaagccgcttcaaataagccacttcatttccgacagcctttgccatcagcttcacctgatgatatttgccttctgtaatggtcaagtgaatcaccgtttcatccgggttttctgtaatgatttcaacggctgccggcttcgtcttatagcctccttcaatgacgacgcctctttccagatgaacgatgtcttccgatgccagaggtgaagttaaccggacctcatatgttttaggcacatgctttttcggagaaagcaggcgatgagcgagctgcccgtcattggtgagaagcaaaaagccttccgtatccttatcaagacgtcccgccggaaacggttcaaatcgctgttcttcaggcgtcagcagatcaaccaccgtttgctggcggctgtcttctgtagcggacagcactccttgcggcttattcatcatgacataaataaattcacgatagtctgccggctctccgtataccgtgatgtcctgtttttccggatcgacatgggttttcacatctttcgccggctctccgtcaatcatgacagccccggccttgacgatttttttcacatcttttcttgagccgaatccgctgttggcaagcagcttatcaagtctcatcctgatcctctcctttaaaaagaaaagcccgcgataagcggactattcattatttctcaatgggcggaatgcctgcctctcctcaaaacgcggggcagacggtttccaaacattttctgtaaaaatccgattcggtacgcggcaaacatgtacaccgcaccgccgacagcggcgcagacaaagacgacaatcgccgcatgcacctggccgctttggtatgttacaaagaaactgagcagccattgagtcagcttgaccgcgactcccatcacgacggacaggactgcgattaaaatgacccgttttataagtaccgtatacgaatagcccgcatggcgcttaatcatgataaaaccgtacagaagagaagcgatataaccgagcgccgttgccaagatggccccgtctccctgaaacagcttgatcagcggcacgttcagcaccacttttataatgacgccgatgaaaaggctcacgacagcaaatttctgcttattaatcccttgcaggatcgcggcgtttacggtaaacagagaaaacagaatcgcgacaggcgcgtaccagaacaatatatcctgtccgatatccgggcgaagactttcagagccgtagaagaacgtataggccggacccgataacacggacatcccgacaacggcgggaataaccaaaaacagaataatttgcatcgtctggttaatctgctgattcaaaagcttataattcctgctcgtaaacgattcagtaatcgtcggaatcagcgtcagaccgaaagcggtcgccagagaaaccgggatcatcacaagcttcggcacataaagggtgacaatcgcaagcatgtcctggctgatatccttatggcccgccgcaatcatcgctttattaaacgtattcgtatcgatatatgaatacaaaggaatcgccagtccgacaaatacgtaaggagcggcataactgaaaagctcaatgaacatttttttataacttaagttcgcagacgggacgagattcggcttcatcgccagaagatcgcccttccgcttattccagtaaatataaaggacgacaagccctccgaatgatccgatcagcgccgcgaaagtcgcgtatccgactgcgatgacaaggccgccgttgatcactcttaaaatcaaatacgttgcgcccaataaaaagatgatccgggcaagctgctccacaacctgtgaaacggctgtgggccccatcatctgatgaccttggaaaaaaccgcgcacaaggctcataatcggcacgaccaaaagtgccagactgaccatccggatgacataaacgacgtggtcaatcgtaagtccgttgttactcgtgccgccgagagatgtttccgcaaaaaacggcgccgaaatataaagaattgaaaaagcgatcatcccggttacgagcataaccgacattcccgctctcagcatccgcctgctcgtctcatagtctcctttggagttatatttcgagacaaattttgaaaccgcggcgggaaatcccatcgtggcaatgtttaaaaacagtgtatattgattatatccgtattgaaacaaagctccgcccgtcgctccgaccatcgctccgaacgggatcagataaatcatccctaaaatccgcgatatataggtgccgagcgtcagcacgaacgtgccccttaacaatttgcttgacatgtttcctcatcaccattttctacgaagattcaacttttctattttaacacaactgggcaattagacggtaataattacagcgggaaactttttgggaaagctcttaaaaacaaaatacgtttaaggaatccccttctttcgctataatagcaggaagcggacatttccgcctattatacgtgaaaaagaaagttgttgatgaaatatgaaacattatgacgtaattgtgatcggcggcggcccgtccggtttaatggctgcgattgcggcaggcgaagaaggggcggacgtattattaatcgataaaggaaacaagctgggacggaagctggcgatttccggcggcgggcgctgcaacgtgaccaaccgcctccccgttgaagaaatcattaaacacatccccggcaacggccgctttttatacagcgcgttttccgaatttaataatgaagatatcatcgccttttttgaaaaactcggcattcagctgaaagaagaagaccacgggcgcatgttcccggtgacggacaaagcccaaagcgttgtcgatgcgcttttgaaccgattaaaacaactgaatgtcaccatccgcacaaatgaaaaaatcaaagaggtgcggtacgagaacggcaggacagcgggcattacgacaaacaatgacgaacacattaacgcagacgccgtcattatcgcggtcggcggaaaatcagtcccgcataccggcagcaccggagacggctatgcatgggcggaagcggccggtcataccgtgaccgaactctttccgacggaagtgccggttacgtcgtcagaaccgtttattaaacaaaaaacacttcaggggctgtcccttagaaacgcggccgtcagcgtcctgaataaaaaaggcaaacctattgtcacacacgtgatggacatgctgtttacccatttcggcttgtcaggccccgccattctccgctgcagccagtttgtcgtcaaagaactgaaaaagcagcccgatgtcaaattacgcatcgatctgtttcccggcatcaacgaggaagagttatttcaaaagatgcacaaggaactgaaagacgcaccgaaaaaagcgctcaaaaacgcactgaagccgtggatgcaggaacggtatctgctttttcttctggaacggaacggtcttgatccgcagacaagctttacggaactgccgaaggatcaattcagggcttttgtcaaagactgcaaacaatttacggttgccgctgacggaacgctttctttggacaaagcgtttgtcacaggcggaggtgtttccgtaaaagagattgagccgaaacaaatggcgtctaaaaaaatggaaggcttatatttttgcggagaaatactcgacattcacggttataccgggggctacaatatcacttcagcctttgtcacggggcgtctcgccggtttgaatgcaggacgtttctcacgctcgctgtaaatggtttaaagcgcatttacctgagcgtccccgttgataattgaccaaaaacatgatacagttttctgcgttttgtttcacctgattgagggaacaggaagaaaggaatgatctgcaatcgtgcgaccatactaaaaaatggcgtattgaaaaaaatagtcagagggtgagaacgtttgaagaagaacatctccagtgttttttggattgtgattgtcatcacagcagctgcggttttatgggggccatttctcctgacagcctgcagcaagtcactgatacggcacaaaaatttattacggattctttcggctggtattatctgctggtcgtttctatatttgtcggtttctgtctctttctcattgtgagtccgatcggcacaataaaactcggaaaacccggggaaaaaccggaattcggcttattatcatggtttgccatgcttttcagcgcgggcatgggaatcggtttggtattttacggggctgcggaaccgatcagccattacgccatcagctctccctcaggtgaaacagaaacaccccaagcatttcgtgatgcgctccggtacacgtttttccactggggactgcacgcttgggccatctatgcggtcgtcgctttatgtatcgcttattttcaattcagaaaagacgcgcccggtttgatcagcagcactctgacaccgcttttgggcgataaagtaaacggcccgatcggcaaagcaattgactgtatcgcggtgtttgcgaccgttgtcggtgtggcgacaagcttagggctcggagcgactcagatcaacggcggtctgcattatttattcggcattccgaaaacattttccattcagctgatcctgatcgctgtcgtgaccgtgttatttttgatttctgcgtggagcggaatcggcaaagggattaaatacttaagcaataccaacatggcgctcgcgggtattttaatgatctttatgctcattgcaggcccgacagtgctgattatgaactcatttaccgattctatcggccaatacatccaaaatatcgtgcagatgagctttcgcttgtctccgaatgatccccaaaaacgcgaatggattaacagctggaccattttctattgggcctggtggatatcctggtcgccgtttgtcggcatttttatcgcccgtgtatcaaggggccggacgatccgggaatttttaatcggggtgttggtgacaccttgtatattggctttcttatggtttgcgattttcggtgtatccgcgatggatcttcagcagaaaggcgtattcaatgtcgcgggaatgtcaacggatacgatgctgttcggcgcactcagccactatccgctgacaatggtgacatccgtattaacgcttattctgattgctgtattctttattacatcagcggattcagcgacatttgtgcttggaatgcaaacgtcttacggctctttggacccgtcaaaccgggtgaaaatcatctggggcgtcatccagtccgccgtggcagctgtattattatattccggcggtctggccgcactgcaaaacacggccattctcgccgcggttccgttttcagtcgtgatccttctgatgatcgtgtctctgtacaagtcattagcgagcgaaagaaaaggaatcaaacaagcggagaaataccaaaaaccgagaagtccccgcgtcaaaaaagcataatgcataaaaaagcccggtatttcatccgggcttttttattttcggtataaaatgagagcggaaaaacaataaagctgctcaccttcaggatcacaggccgccgctaccgtatatttaatatcaacgagctgttcatcagaaatcccctttaaaaatgtattgacttcagtctgcagatccttttcatgctcctcatcaaaaacagctatcttcagcacatcaccctctcctttctctatcaatttattccggttcaattgaaatatgatagagaaaaacagattttcttttttactgatttttactaaaagtaaccaaaaatagttattgaaaacgcttactaatatatgataatatcattttaacaataaccaggtcatttctgtttagtaaatatttagtaaaaaggagatacgaaatggtccgtctcaaagatattgccttacaggcatctgtatccagcgcgacagtatcgagaattttgaataaggatgactctttggccgtgactgatgaaacaagagaaaaagttctgaggatcgccgatgagctgggctatcagccgtcggcaaaaaaacggaagaaccgcagccgcagcgattcagcccccctgatcggcgttgtcagctgcctgtcaccggaagaagaacggcaggatccttatttttcagcgatccgaaaaggcattgaggaagaatgctttcggcaaaaagtttttatcacatcttctatccatctcgggtcttttcaagagcatatgtttcacgatctggacggcgtgatcgtaatcggcagcctgcaagacgaggcgcttacgaatatcagcgccgctttcaggcacgcggtatttgttaacggcacccccgatcccgcccgctacgattctgtcagcgtggatttttatgccgcagcgcaaaaggcgatcgaacatcttctgtcgctcggttaccagcggctcggttatatcggcggccgggaacgggagcataccgtcatagacggtgtaaacagcaataaaacgattgaggataagcgtctgaccgctttcttacaaatggccggagccgggccggagcatgtactgatcggcgaatacagcatgcacgaagggttccggctgatgaatgaagccatcaaaggcggaagtctccccgatgccttttttatcgcaagtgattcgatggctgtcggcgctttaaaagccttgcaggaagccggccttcaagtcccgcgcgatacggcaattgtcagcttcaacggaattgatgaggcagaatacgccagcacgccgttatcaacggtaaaagtatacacggaagagatgggccggacgggtgtcaaattgcttctcgaccgtttaaacggcagaaccgtcccgctggccgtgacgctccccacttcattgattgtcagacaaagctgcggctcacaagaaaggaggtgacatgtcccgcagcgtttatatcatatttaaaggaggaaaagatgaaacgcttactggctttgtttctttcttttacttgcatgatactacccggctgctcggcagaacagagcggcgccggagaaaagcagaaaacattgacagtctattccacaatatcctcagacagcgaacgcgccgtattcagaaagttggctgattcattccaaaaagaacatccggacattcaagtaaacgttcatttcccaggcaatgactacgaaaatatgatgagggtcagaatggcagccggtgacatgcccgatcttttcgacacacacggctgggctaaaatccgctacggagaatataccgccgacctcagcggcatgtcttggacgaagcggctcgatccgaatttaaacagcatgctcaaagacgccaaaggcagaatatacgccttccctctgaatcaggcaaaggacggactggcctacaaccgcacaatgttggaaaaatacagaatcaaaccgccggaaacaatggatgattttatgaaggcactgagacagattaaagaaaaaagcggcggaacagtcacccccttctggtttgccggctatgagaaaagctcatttgcccaatattacgatcaattcgccgcaccgcttctcatcacagatcccgcacaccgttacaaaaaacagctgttaaacggaaccttccgctggacacacttcacctatttatctgacaaactgaaagagatgcaaaaggaaagcctgctcaatatagatgccgtgacggcaaaacggtcccagctcattgaactgatggcgcaaaacaaaatcgcctttacgctgcagggcggcaccctcggccaagacgtcgctcaaatcaatccgaaggtaaaagtcggcatcataccgaccccggccgtccacaagggagacgcgccggtttggatcggaggcgaacgttacacgctggcggcattcaaggattccccgcggcttgaagaagcgaaacagttcatcgcatttatggcccgtcccgagcatgcgaaatcaattgccgaagcgacctcgcttccggccggattagtgaatgtgcaaacggacattttctacgcaaatgactataagcgctatcagcatattaaggtgcagccttattttgaccgcctttatttgccgaacggaatgtgggatgtgatggggacagccgggcaggagctgacggccgatatcttaacccccgcggaagtttcggcgaaactcggcagggaatataagcggctccgtcttcaatctgattcacaaggagctgacaaagaatgagtgatcttgcaagagaaacccaaggatttcagcatcaaaagccggtaaaacccgcgtcactgtggtggatgtacgttcccgctcttgccacggtttttattttcatgatttttccgtttgtcaaaggcgcttttatcacattcacaaactggaacggcttctcacagacgtatcaatgggtgggggtcactcaatataaaaggctttttacagatccggacacgtggcttattgtgaaaaacactttgctttacggcatcggaagcactttttttcagaatatgctcggacttttatatgcgctgcttttgaatcagagcttaaaaatgaaggcgctcacaagaacgatcgtctacctgcccgtcattatcagtccgctgattatgggatacatttggtattttattttctcatatgacgggggtgcgctgaatgatgtactgggcgcactgggaatcggtcctgtcaacgccttggcaagccctgcggcaaacccgtggattatcgtcatgattaacacgtatcaatacgcaggcattgcgatgattgtatatttggcggggctgcaaagcattccgaaagattattatgaagctgcaaaaatggatggcgcgggaggtcttcagccgtttttcaccatcaccctgccattattgatgccggctgtcaccatcaacatggtcatcaatatcatcggcgggctgaagctgtttgatgtcattttcgctctgaccgcaggcgggccgggcaattcctctcaatcgatgtcgacgtttatgtatgatttatattttaaacggcaggatgcgggatatgccgccgcccaaggcgtgtttatgtccgttattattcttgtcatcagcttttcggctctcgtgtatttcaagcgaaaggagacggaaatgtcatgaaaacagcccgaatgcggatttttacgctgttggctgccgttatctcgtgcgttcattttgtccccttttatattttgctgaccacgtcattaaaagcaaaaggagactacagttcaaaatggtcgctgccatccgccttttcatttcagaattttcgtgaagcatgggagcgtgcctctctcgggcaatcctttctgaacacgatcattattacagccgtttccgccgccttgctaattttcatgggttcgcttgccgcatacccgctcgctagaagaaatacaaagctgaacaaaatcgtcttcggccttttgatttccatcatgattatcccgcctttgacttccatggttcctttatacaagatggtcgctgatgcggggctggtcaatacgcatgccgcagccattctcattaatacggctgcatatatgccgctgaccgttttcttatattcagggtttatccgctcttccattccgaaagaacttgaggaagccgccaggatggacggcgcgggattgatcaggactttttatacaatcgtgtttcctttgttgaaaccgattaccgcaacggtctgcattatttcctgcgtgtttatctggaacgattaccaatttgcgattttctttttacaagatcaaaaggtgcagacattgaccgtggccatggcggggttcttcggcgaaaacgcgaacaatcttcacttagtcgccgcagccgcaattatggcgatgctgccgatggtcgtattgtttttggcacttcaaaaatattttatctcagggctgtcctccggggcggtcaaaggctgagaagaaaagggaggaatttctgttgaagaaaattacgtttatcggagcggggagcacgattttcgcaaaaaatgtactgggggactgtttactgactgaagcattaaacggatttgaattcgcgctttatgatattgacgctgtacggctgaaagaatctcagctcatgctggaaaacatgagagaccgctacaatccgagtatatccatcatctcctacgatgaccgaaaacaagcgcttacacacgccggctatgtgataaacgccattcaggtcggaggctataaacccgcgacggtcattgactttgacatcccgaagcggtacggtctccgccagacgattgccgataccgtcggaataggcggcattttccgttcccttcgcaccatccccgttttatttgacatcgcaaaagacatggaagaggtctgcccggatgcgtggctgttaaactatacaaatccgatggcctctctgaccggagcgatgctcagacatacaaatgtcaaaacggtcggcctgtgccacagcgtccaggtctgtaccaaagatctgttcgactcactcggcatggatcacgaaggtacggaagaacgcattgccggcatcaaccatatggcttggcttttggagattaaaaaagacggaattgatttatatccggaaattaaaagacgggcacgcgaaaaacaaaagacgaaacataaggacatggtgcggtttgagctgatggataaattcggctgctacgtgacggaatcatctgagcataatgccgaatatcacccgtattttataaaaagccggtatccggagctgatagatgaactccaaattccgcttgatgaatatccgaggagatgcgcggaacaaatcaaaaactgggaaacgatgagagacgggatcatcaacaaccaaaacctgacgcatgaacgctcgaaagaatacggttcgagaattatagaagcgatggagacgggccgtccgttcacattcggcggcaatgtgctgaataccgggctgataccgaatctgccggcgaaagcggtcgttgaagtgccgtgcgccgccgttaaaaaccaaattatgccgtgctattccggcgaacttccggagcagctcgcggcgctcaacagaacaaacatcaacacacagcttttaaccatcgaagcggccgttacattaaaaaaggaagccgtatatcaagcggccatgcttgatccgcatacgagcgccgagctttccatgaatgacatcatctctttgtgcgatgacttatttgaagcgcacaaagaccggcttccggcttatcactgatcattcgcgatccggtcccgggcgggccggacgtttttatatgttcagcaccagtttgaccgtctgtaaggtgtgtcctttaaaatcttcttcaaattcacataccctttgaaaccctttcgcttgataaaaggacaaggcgatgcggttctctttttctgcatggacataaagcttttttaccccgccggactgcctgatgcattctttaagaagtgccgtgcctatcccgcttccctggcaatccggatcaatatagatggcggtcagctccgcatttccgtctttttgaaccggggtggcatttgcaaaaccgagcactcgcccctcttcttccgccacaaagaacaaagaatgcaagagccggcgttccatcatctcatcctgataggcggattcgagaaactgatcctgaatgtgtctgggaataatcccttcatacgtatgatgccagctgcgttctgcgacttgccggacctgtttgatatcgtttgttttcatcgcgcggatcatcggtttcacctgattcgcctcccgttttttttataaaaaaagaagaaaaagacgcacgtcccttttcttctttcacttcaaagcgttatttcttcggctttgtttcgccttcccactccagcatgccgccttcaacattaactgtacggaagccctgctcatgtaaatacatacaaacgttcatgcttctttttccggaacggcagataaatacatattccttgtccttgtctaacgcatccatcttctcagggatgtcccccatgcggatatgaacggcctccggaatcattccttcggcaacttcttcgtcttctctgacatcaatcagatacagctcttctcccgcttttaatttttcttccagtgcggctgtgctgatttcatttattttcaatgtgtgacactcccattcatctttatggtgttaagtataccaaagcccgcggtgcaatttctatgatagaggcctgataaaaaagcccctctctgtaggagaggggcttcgtccggtcagtttgccacgatattgacaagcttgcccggtacggcaataatttttcggatcgtttttccttcaagctgctcttttactttttcgtcagcttgtgcgagctgttctaacgctgctttatcagcatcagccggaaccattaatttcgcttttacttttccgttcagctggacgacgatttccacttcatcgtccaccagttttgattcgtcataagcaggccaagcctcgtatgcaatcgaaccttcgtggccgagtttttcccacagttcttccgccaaatgcggcgcaacaggagaaagcagcttcacaaaaccttcgatatattctctcggcagttcattcgctttgtaagcttcattaatgaacaccatcagctgagaaatgcccgtgttaaaacgaagggcttcgaagttttctgtcactttcatgaccgtttcatgatagacgcgctcaagagtttcgcccgcgccttctgtcactttgcccgtcagctcgccgttttcctcgataaacaaacgccatacgcggtcaaggaagcggcgtgctccgtcaaggcctgattcagaccaggcgatagatgcgtcaagcggccccataaacatttcgtacaggcgaagcgtatctgctccgtgagacgccacaatttcatccggattgacgacgtttccgcgggatttactcattttttcattgttttccccgagaatcatcccttggttatacagcttttggaacggttctttcgtcggcacgacaccgatatcatagaggaatttatgccagaaacgagcgtacagaaggtgaagcacggcatgctccgcccctccgatgtaaatatcaacgggcagccatttatccagtttctcaggtgaagcgagctgatccggatttttcgggtcgataaagcggaggaaataccagcagcttcccgcccattgcggcatcgtgttcgtttctcttctgccttttctacccgtttcaggatcagtgacttccacccactctttaatgttggcaagcggtgattcacctgttccgctcggtttgatctcatcggttttcggcagaatcagcggcagctcttccgccggaacggctgttgacgtaccgtcttcccaatgaatgaccggaatcggctcgccccaatagcgctggcggctgaacagccagtcacgcagacggtatgtcactttcttctcaccgtttttcgtttcttcaagccaggcgatcattttttcaatcgcttccgctttattcagtccgttcagaaagccggaattgacatgttctccgtctcccgtgtacgcttcttcttccgtgtttccgccttttacgacttctttgacaggcaggctgaacactttggcgaattcaaaatcacgttcgtcatgcgccggcacggccattacagcgcccgttccgtaagaggcgaggacataatccgctatccagatcggcagcttttccccgtttgcagggtttacggcatatgcacctgtgaagacgcccgtttttgttttcgcaagatccgtccgttccaggtcacttttcgcctgaacttctttaacataagcgtctaccgcttctttttgttcaggcgtcgtgatggcctccacaagctcatgctcaggagccagtacggcataagccgcgccgaacagcgtgtccggtcttgtcgtaaacaccgtaaacgtgtcatcagtgccgtcgatcgcgaaatgcacgtttgcgccttctgagcgtccgatccagttgcgttgcatgtctttaatgctttccggccagtcaagttcttctaaatcttcaagaagcctgtccgcataagcggtgattttcagcatccattgtctcatcgggcggcgttcaaccggatggccgccccgctcgcttttgccgtcaatgacttcttcgttcgcaagcaccgttccgagcgccgggcaccagttgaccggcacttcgtctacgtatgcgagccctttttcgtacagcttggtgaagatccactgcgtccacttgtaatagtccggatcagtcgtattgatttcacgatcccaatcataagaaaatccgagtgattggatctggcggcggaaattatctatattttgttttgtgaactcagccggatcatttcccgtgtcaagcgcgtattgctcggcaggaagcccgaacgcgtcccatcccatcggatgaagcacattgtacccttgcatgcgtctcatgcgagaaaggatatcggttgccgtatagccttccggatgtccgacatgaaggccggctcctgaaggatacggaaacatgtcaagcgcgtaaaacttcggcttgtcattctcttcactgacggcgaacgttttatgatccaaccagtaattctgccatttcttttctattttttcgtgctgaaaactcaacgtaaaaacctccttctgattgaatacggcgtatgtagtccaagtattgacgggatgaggaagattatattcagattattctaaaactaaaaaaaactccctcatccctaaaagggacgagagatttttgtttcccgcggtaccaccctcgttagcgcggttttaagccgcactcacttgatacttttaacgcagttatgcgtcagcggttttgccgctgcaactctgaggcgagttcggaaacagacttgattgacttgcaccggccgtcaattctctgagtgcgaaatctgcttcttactgctcctcttcactgttcttatcgctaccgtaatcttacctgtattttatagaattctgttcataagtgcaagcaggtttgtatacaatgggaatgtacccggaacgggtcgtgagcggggatattattttgatggaggatttttttgctggtgtggttttgcttcggccgaatcactgttttgttctctgacaaaatcaaagctcctgagaacagcttctccgccgtagcctgcgattatggataagatgacgagttgaattcctgaatcggggtcagcggataagacaagtaagatggaagcagccattccgataaaaccatcttccaaaaaaccgagatagataaaccgctttgtcattctgggtttctccagcctgcctctctttttcacatgaccgagaacccccatgatgcctccaattacacaagcaattattacctgatgcagcatcttcatcaccttcctaaagcccttatttagtaaagcgacttcaggccatccagcccccttacgaatacgatgattttcgatatctacataccggcgattgagcaggaaagtaaaaagcttgtttcttccattatatgtgaacacatgatcggtaagcttgatgcattagattcatttttcacccagtgacaatgacctagtcacttacttagcgatgatgtgccttccccttatatattcagtgtatatgaggacaagcccgaatgacaaattgcaaacttcggctgcttgaatcagaacatatgttatgctacggttactgtagattcatttaaaaaggggagaaacaacggctgaaaaaagcgcgcagctttacggccaaaagggggttttacatggctgactcaaatgtatccggaaaactggagcagctggagcttatcaaaaaggcgcttgatcacgcacgcatcggcgtggtgattacagacccctctcttgaggacaatcccatcatatatacaaatcagggatttatggatatgacaggctacgcttccgaagagatattaggtaagaactgcagatttctgcaaagcaaagaaaccgaccgtcaacaagtcgcgaaaataagaaagagcttaaaccagaaagaaaagatcacggtgcggctgaaaaatgtcaaaaaagacggcaccccgttttggaatgaactcaacattgatcctctgtatgttgaagacaagctctattttgtcggttttcaaaaagacattacagagcagaaagaatacgaaaagctcctggaggattccctcacagaaatcacgacgctgtcaacaccgattgttccgatccgaaacggcatctccgccttgccgttagtgggaaacttaacggaagaacgatttgattcaattgtgacaactttgacggacatattaaccgcatctaaagatgattacttaattatagacttatcaggtttggccgaggtaaacgaacagacggcagaccagattttcaaattgcaccacctgcttaaattaatcggcacagaactgattatcaccgggatcaagccttccctcgccatgagaatgaatcagcttgatgccagcttttcttcattaaagacgtatttaaacgttaaggacgccgtcaacgtgcttccggtcgtataaacaaaaaaatcccgctgtttcggcgggattttttatgtcgtcatcgcacttggatgttttgtttattaacggttttcaggcgtttgtcgtacagcaccgtcgctgcgatgctgacaacaagaagcaccatcaggatcaacagcagcacgctcatgccgtactgatcaaccagcacgccgccaaggagcggcccgatcattctgccgcccgtcgccgcactgttgacgaatccttggtaaaacccttctttccccttaggcgcaagctgattggcaatggtaggaacggcaggccagacaagcatttctccgacggttaaaatcaccattgcggtgaggtacatcggaaattgcttggcgctaagaagcacgccgaacgaaacgataaaaatacaaaagccgatgaccatctgcgtttttaacgcgcctgaccattttttcagaacagctcctatgagaggctgtccggcgacaattaatattccgtttacggtccagagcacactgtataatgaaagcggcataccgatgctttgagtatgtgacgcaacggttgtggaccactgcgaataggcaatccacccgagaacatacccgccgctcaatatgagaagcgccgtaaatttcgttctgctgctgacaggctcgtagtccagaacagaaacctggctcgcatttccggttttgatatttcgaaacccgaaaaatacgataaggaaaaacagcacatacagcaaagcattggctaaaaacacgtacgtaaacgagtacgccgcaaccatcccgccgagtgccgagcccacggcgacacctgcgttctgagctacataaatcgcattaaaagctctccgcccgccttctttccataccgctcccgccatggcgtaactggccggaaacacgataccggaaccgaagccgacaatgatgagcagccaaatataaacgggccattggtgaaacagaacgagtccgagaagacttgccaatgtgatcataatgcccagcataatggatttgaatccgccgattttatcaaacaaaaatccgccgcataaattccccgccacactggccccggaattcagcatcagaacaatccccgcaacagtcagcgatttccctaaatgattatgaatatagatcgtattcagcggccacaaaaaagatgcgcccgtcacattgataaacattccgatgattaatatcttcaaagcgcgcggcataccgatccccctctctctataaaaaaccccatgaaaaaacggaaaccgcaagccgcggctccgtatcgatcacgttatcatagcacattcattctatcgccgcggacgtcttttttcaacatcagaatctgaaaaaaataatgccggaatgttgaaaaaattacaaatgattggattcgcaaaaacagcccggcttcatgctcttttcctcagcagccaaaacggaatatacagaatgaagaagctcaatatcaccgccgcttccattgatagaagataccacggccaaggtccgaaaacattcagaagcgaagcggtcttcggttttttcattaaatatagataatttgcattcagcacacgatcaataaaaaagacacacgccccgtacagatttacgatcagcaccgacacccacagcccgcgcgccgacggcctgtacctttctgaagcggccatgaatagacaggtaagaaaaacacagccgtgggagacgaaaaacacgatgtaccgaaaatgcgggaaagaatacgcccctaaatcaggtgttgccatcgcctgtacggcgctgcccaaaccggcaaaatagaggaaggcgaatagctttttgctttttgtcatgaccatcagcatcgccaaatagacggaaaggtcgctcagctgcagcggcagagctgttttcagcgaccaggcatgatgacaaagcagccatatatgatagctgatctgcgacacggcaaggagaatgaatagtacatagcggatcatgcggctctggttgagctttttccggaatacgatcacgcccgcccccagcaacccgatgatcaacaatgtgaaaatgtgttccttggaaaaaagatgaaaggcccctgtttcagatttcaattgaaaatacttctgcataaggctcccccgcgcgaaaaaatgacgtatgtctattcttttaaaaatcgctttcttctattcatacaaaaaaagcctccgcttatgcggaggctcctcaacttgttttacaaggcggattgaatgacctttttataatacagcaccgacagcatgccgaagatggagtacagcagcgtatacagcgccatgacgatgatcatcggcgtccacacttccgttccgaataaaaaccatcctgactgaacggcaaaatagctgtggaacagcccgagaacgagcggaatgccgaaatgatacgcctgcttccggcggatgcctttcagcagatctcccgttgtgaagccgagcttccgcaatatcgtataatcagccttctcatcctcacactcgcccatttgtttaaaataaaggatacagcctgaggtgatcagaaaggttaatcctaaaaacccgacaataaacatgatcagccccatgtttttcttttgcgtgtcagccgtttcaaattgtgaaagcgcaccgtctgaatagtgctgcgcctgaaacagaccatcagctttttggatgtcctcttctcgtttgagtgtaatgccgaaaaaccgatttgattttccctggatggacgggtcgatatctttctcgatccggtcgaatacctgctgcgtgacgataacggtcggcagccctccgcttgtaaatgtatatgacaggaggaagtcgttcttcaagcccttatacgccagcggtattttatccgttttgccgtttatatcaatggaacccgacgttttcaggtcgagaaatcttttcatcatatcattatatccggtaaacacggcttctccgtcagaaagctccgtcccttctgcgtctttctcgcttataatcggcagcgccaggctggacgggtcttgttgaaagcttttcatgtcgccgtttataatgttcttcatattgacaccggcttgaatggtcttgattgtttttactttgtgttcaattccgtttttcttcaataaagcggtaaaagagtcagtctccttttggttatcaaacgcaaagtccgcggctgtattttgctcagccgatttttccgcggagtagtacgagatatagcttaaagacagcaaaccgattgccagcgccgaaagagtcgtaataatcgtcagcaatacggcgtttgacttcatccggaacatgatggatgacaaagacagcacttcactgacattcagatacccgccttttgatttccggatgagatttgccagaaagctgaccgaacctttataaaacagataggttccgataatgaccgagccgagaataaacaccatggccgaaaacagttcattcatgctcgtaaaactgcctccgaataaatccgcggacacggcatagccggcgataatggccgcaataccgacaacgccgatcaacatctgcacccaagaaagccgtcttatgccgctttctgacgatgacgcggttttaaataaagacaaaatgctttgccgtttaataaataagtaattcatcatcataatcagcacgtaaattgccccgaacacaattaacgtctgaacgagcgccttgcttgaaaaaaacagtgagacagaggctttcacaccgactgtatgaaacagcatcatcatacataatttcgagagggaaaagccggcgaaaataccgatccaaatcgatccgaaatacaaaatgaaattttctgcgctgagtatgcggaaaatgtgcattttcgtcatcccgattaatcggaataagccgatttcccggccgcgccgtttaataaaaatggtgttggcatataaaagaaataccgacacgatcgccacaagcagtacagaggcggcccggattgccgccgctccttttatggagcttttcatttcatcaagcgccggatcgtattgcatcgtgacaaacgcgaaataaagggcggcgctgaacaccagcgcaaaaacgtaaagataatagtttttcatattctttttcaggttctggaagatcaaatgatgaatactcatgcctgaaccccgcccaatacactttgcgttttcataatatcctgaaaaaagtccggtctgtcctgaccgcctttattcagctgcgtatacacacggccgtctttaatgaaaaccacacgtccggaatagctggcggcaaccggatcatgcgtcaccatcacaatggtggcgcggcgtttttgattcaggcggctgagtttattcaataaatccgtggcagcctttgaatcgagcgctccggtcggctcatcagcaaaaataatgcccggctcgtgaataacagctcttgcggcagacgtccgctgtttttgtccgccggaaatttcactcggatacttatgtctcaaatcatagatcccaagctcctctgccgtctcggcaaatcgcaggtccgcctctttcttagacattttcgtaatggataacggcaggagtatgttttccttcacggtcagcgtgtccaataaattataatcctgaaaaataaagccgagatgccgttttctgaattcggcaagctgtttttctttcatggatgtaatctccgtctcgttcagtttaatggtgcccgagctcactttatcaatggaggaaagcacattcaaaagggtcgttttccctgatcctgacgggcccataatgctgacgaattcccctttgtgaatctgaagatcaattcctttcagcacctcttgtttattcagcttgtttccgtagcttttttggatattgcctgcttctaaaatcatcacgttatgattctccttttacattggttatctttattttaaaaacagaagccgtttttttcgtttgattaagcgaacaaaagagaaaagcatgtgacacttttgtcacacgctgaacatgctgacggcatcgttctgttttggaaacaccaaggtaaaaatcgtgccgctttccggctcagagcgcacgctgatctggatgagaagcggagccgcggcttttcgagccaaatacaggcccatccccgttgacgcgtgatctcgcctcattcgcgtcgaggtaaatcctttttcaaaaatgcgcggaagatctttgggctcgatgccgatgccgcggtcttcgatatcgacatgcacccggccgttttgttcatagctttttacggtaatgtcatccgcttcactgtatttgacggcattgcttaacagctgcctgatgatgaaggaaagccattttccgtcactgtgaacgtccggtgaatcaagctgaatgtcaaacccgatccctttttgtatgcaccatgattgcaggtttttaatttctttgaaaacgagcggtctgagctgaatgcgctggaatgataaatcattttcaataaaggacaatcgtttctgatgaagctgctggtccaggagatggtgaatccgcagccattcatacagcaaaggggctttcagcggctgttcatcaaggcgctcgatcatgagatgcatcgctgtcagcggtgttttgacctcgtgaatccatgacatcagatcatccttttcatgctctgacgccgcctgaagatcaagtgagctttttcgtaattgctctgtctgcccttcaatgctttcttcaacgatagactcaaacggactgtcaggcgctttaagataagacatgtctaaattggcgtcccactctcttaagcttttataataggcggtctctttacgatagcggaacaagagaaatacaagaaacacaagaagcgacaggtaaacaaaatacagcaccgaaaaaaacggaatagacgcatcaatatatgccgcaaaaaggagcacagcctgctgcaaaagaaacatcgcgatccagctttttctttcgagcagaaatgatttaatcataaagaccgtcttcttcctttgcgatgtatccctgccccaccttggtttcaatcattttcccgatgcctaattgatcgagttttttccgcagccggttgacattcaccgtcagcgtattatcactgacgaaacgctcatcattccataggcttctgatgagttcttcccggctgacgattttatttttctgctcagccagcagttttaagatcagcatttcgtttttggtcagttcgaccgaaccgtttttacagctgaccgtgttggtttctgtgtcaatgaccgccccgcaccatcttttcatcagcgccggttctgtgccgtattggtgcacacggcggaacaccgcctgtattttcgcgattaacacatcaaagtgaaaaggcttctgaataaaatcatctgccccgagctgcatcgacatgaccatatccgcgggatgatcgcgcgaggacaaaaagagaatcggcacgtttgattgggagcgtatcattctgcaccaatgaaagccgtcaaatttcggcagctgtacatcaatgatcaccaaatcaggcttaatttcagtaaactcccggatgacccggctgaaatcctttattccgtgcaccgcaaatgaccagcccgttaatctctccttcatctcgtgaaacaaagtgttatcatcttctattaacaaaatgtgaaacatggtatccgcccttttctgatagatagaggaaaaaccggctgatgtccagccggcttttttcctttacagttctcttcttaatgcggtcagaacgttggtttttgtcgctttgcgggccggattcataccggaaatcaccgcgacccccgcacaaatgacaactgcgatcacaacgaggctgagcgggatgtaggagaaggtataatgaagatcttcagctccggtatttccccctaccgctttcaaaataaccggcacagccagattgacggcaaaactcactccgtaagaaatgataatcccgatgacagaacctaatatcccgatataggcgctttccatcaggaacattctgcggatgatggacgggcttgcgccgatcgctttcataatcccgatttcctgcgttcgttccgtcaccgccatcgtcatcgtattgaaaataccgatggctgaaatcacgacggcgataaagccgacaaagatcagaccgattttaaagacgaggaaaaaggtgttgacgcccttcagctcggttgtgacagatctgacataaaagccgtcatccgtgaggtcatgggtaagctgatcgacatgatcgaatttgtccgcatacacattgatgcttttttccgcatttccattcttcagatccaagaatgtcgagaagtctttcttgaattgatcactcacaaaaatatttgtatcctccatccaatcttgggacggtttttttgtaattccgactactttgaagtcgtacgttttcgttttttcaacgtctccgtctttgtttgttttggagatgctcagctgtatcgttttattaagcaggtctttcgtatagccttttggttttttcacctccgacatgtcgccttggtgatcctttaactctttgtcgtaagcgtcagcctcttttttcgtcaataggttcttcgcaaaatcatagccgaccacgatttcattctctgtacgggcgactcttccctgatcaagctccatattggctttgacttcatctttcatgtttgtcagcacaatggctgaatcttcatttgttcggtttcccaatgacgctttgttcggttcatacacttgtgttctctcaacgacagacttgacatttttatacttttccaagtctgatttcttcacggcttttccgttctcttggccgagcacattgatttccgtaacaatctgctggctcatcgtaatgtctgtaatcgttttttggatgccgaatccgacggaagccagcaccactaaaaacgcgcacgccattgtcgtcgccagcaccgtcatgaaaacacgcagccggtttttcttcatatttcttctgataaagtgaatctgatccttaaatctcaacagtaacgcccccttttaatacaccgtcatgcagctggaattttgaatgcgcgatcgaagcgacttcatcgtcatgcgtaatgatgacaaatgtaatcccgcgctcccggttcagctgctgaattaatgcaagcacctcaagttccgtttctgaatcgaggcttcccgtcggctcatcggctaaaataattgacggatttaaaatgagggctcttgcgatactgacacgctgctgctggccgcctgacagctcattcggataatgattcgcatgattttcaagtccgacccgtttcagcatatccgcgactttctgcttgcgttcagacggtttgacaccttttaaggcaagcggcatttcaacattttcataggttgtcagactcgggatgagctgaaagctttgaaaaataaagccgaaatgcccgaggcggaactgcgcccactctttttcattgaaacccgtcacatcagtgccgttaatgacgatacggccctttgtcggcgctatgtatcccgaaattaaattcagaagcgttgattttccggaaccgctccgcccgacgatacaggcaatttcccctttttcaacggtcaaagagacatccttcagtaccggaacctcactctctctgcctttcctgccgattttaaatgaatgatcgatatgctgtacctctatcacgtacaccactcccccttatatctgtttcgtttttttatagatgaagtaataactgatgaaaaacccgataatcgcaccgatgagcatgccgaatatgtaaccggtatacgaaccgttataagcatatccgcatacccccgcacttcccagcatactgagcgacatgacgagcacttgaatgatgcgttcaatgtgtttgctcaggataaaatgtccgcttcgttcattcggcattttcaggaaattcacatagccgaatagatagaaacaaaatcccattaatgcggagatgaacaatgcgtgtttcatgtaatacatccatgatgtatggatgtaagcggcaggcatgaaatagatcagaaatccgctccaagggaaatcaatatccggcacagcctgcctgccaaaaaggaactcggcgtttaacagataaatcgtcataaccacgatcggaaagacggaaaccgtgaacgctgtgatcagctgcgccgctaaattgcccgttatcgtgccggcagctgtcactaatgcgtaaatcatcaagctgatgaccagcatccctgcgctgaatgattgaaaatgatggacagcgtcaggtttaagcgctaggaacaatatgtcggatactccgtaagaaacaaactgcgagccggctaacacggctgctcccaagaaaaacttcgtatgaaatatccggcttctcgaatacggaagactcagtgtaaacatcctttcagcccggcctgctcttatcagaaaaagccccataacaaccggcggaatgaaatgaagcccaatcaaattccgataattgctgtaatcgatgctgaatgtacaaactgaccccgggtacagctgaagtgcacgtaaacaatccttatagtgaaaatactcatttataattgccaaagggcctaagatagataagaaccccgctgtaagcagcagcagcgtctgccgctgcttacattctttataaagcaaaccgctaatcggcaccttgccttcctccaaactgctcattttcaaacggatctacatatgctttgactgtctgtaaaccgtaaaataactgatgaaaaacccgataaccgcgccgaagataatgccggctaaatagccgaacatcgtgtctgtgaccccatatccgaaaacgccgaaacccataacggcaaacgcaatcaccaagatctgcaccggccggtccaattttctccaaagaaagaatctgccgttccgttcattcggatgtttcagaaagctgacgtaaccgatcagataaaagacaaggctcatcacaatcggaatgattaaaatcaaatctctttctctgatccagtcgttaaacacatatccaataggggttataaatataaaaagacgggattcgatataactgctgataaaagaaaattgatctccgacactaaaatcgaaaacgacctccaaattcgcggccggcagaccgatgagtaaaaagggcagaaccgttactgtaaacgccgttaacagctgggcgaatatatgtcccgttattgctccggatgccattaacaaggcgtaagccataaagctgatgacaatcattccgattgaaaaatgatcaaaatcgtacgtatggctcggtttcaacaaagatatcagcaatgacgccgctccatagcctatcgcctgaggagcaacaatgactgccccgccgagccagaatttcgtctgaaagatttggcctctgctgtaaggcatgcttaacaaagcatccatcgttccctttgtccgttccaagcctaataagaagacagcaatgatgacactcacaacccagctgaaggaaagaggcgacccattcgtataattgacaacgaattcacaatcttgaagagctgggttattcaaacattcttgatatgttgagtagttgttataaaccataaaagggtttgccgccattaaaagaatgccgctgcataaaaacaaccactgattttttttccattctgtgtacaacaatccccgcggtatcattccggtcctcctctcttacacatgcttcgtttttttataaatcacaaaataactgaccaaaaatccgatcgctcctccgaccagcatcccggccacataccctgtcatcgtatgtcccgtcgagtaccccgccaggccaaaaccgagaacggcgatgatgatcaccacaatctgaatgggccggtcaagctgtctccaaagaaaaaaacggccgttccgttccaccggctgcctgacatagcaaaagtacccgatggcataaaatacaatgctcatcactgccggaatgattaatatatacttgctggcagatacccagtccgtattaacatacatgatcggaatcagatattgaaacgaatcgtttaggtaagcattgactgatggcatcagctcatgcatgccgaccctgaagataacttccgcatttgtcagcggcaacgtaataatcaggtaaggcgctatcgacacggcaaacgccgttaacagctgggcgaacgtattccccgttaagcagcctgcgctcgcgaccaatgtaaaagccaaaacactcacaataatctctccgacgctgtaatggtggaagaaatatacgcgctcaggctttaacagaagaatgagcagctcagccagcccgtagccgatcacctgagcgccggtaatgaccgccgctccgagccaaaatttagtgtgaaacacctgagcgcgggaataaggcagactgaaaagcgcatcaatcgttcctttcgtacgttccagtccgaataagcaaaccgccaaaatcacagcgggcgcccagtttaagttcagcattccgctatccaaagaattcacataaaacttacaatatgcttcgtgggtgtccagacagccttgataaaccagataggtatttaacacttcaaatggattgaccgccgctaaaaaaatgccgaccatcacaagaacagttcgattctgcacccattccctgtacagcaatcccctgtctaccatctccggtcccctccaaacttcgcgatgaaaacttcttctaagttcacaggaagttcgttccatactttcggctgcagctcttgcagaaagttctttttcttctcatcgttcttttgaatcagcaccgtataaaacacaccggcatggtcgagaatcggtatattttgttctctgatcttcaaggcgacgtcctcttcaaatgccatttggattttcatgtactcttccttcatatcatccaagtccatcacattcgtcagctgatttccttccaaaaacccgatccggttgcacattcgctcaatatcttctaaacggtgtgaggtaatcagaatgctcgtttcccgttcagctacttcatccaccataagctgcagcacgtcatgacgcgttacggcgtcaattccgtccgtcggttcatccaaaaggataagagccgggcgtgaagcaaaggcaaggacgagcgcaagctgttttttcaggcctgtggataattcacggtatttcttcgtttccggaatgccgtacctgttcatcagctcattggcgtaagtcacatcaaaattcggatagattctgcttacaatcgcaacaagctgtttatatgtatacttgtcataaaaaggattttcaacaggcatataaataatgttctgtttgactttcggatgacgctttatttccacctgattaaataaaaccgtcccttgatccggaagcagaatctgctgaatgagccggagcagtgttgttttccctgatccgttccgcccgagcagcccgaaaatttccccttttccgatggtgagcgaaatatccttgagcacttctttaccgtctatcgtttttgagagattccgcaattcaatcatgatcctttcctcctttcacatcagcgctgatttcctttatccattcctgcagcttctccagctcaactcccgcgtaatgggcatcgatgatgagctgtttcaattgctcttttatcatcgtcatcttcccttcaaccaatgtcgtttttgcattctccgatatatacgttcctcttcccctcagcgtttcaatgacaccatcgcgttcgagctccttgtacgctttgctgactgtgttcggattggcgataatgatcgttgccaattccctgacagaaggaagtttatcccccggcttcatgatcccttttaaacaaagctctttcaattgctgtatgatctgctcataaatcggagttgagcttctcggatcgatttgaatcatttacttcccttctttcttttacgagctgctctctttctttaaatgttctgccattgaaaaccgatgacgacaagaacgacaaacagactgctggccaaaaccgaagcggcgataataagaggcacatcttgttttacggatcttttgtttttcatgaaagttccccttccctatgcttaacatttatatgtcgattcatttttcgagtgttttatgtgtattacatcaagtagtacacgtaatacaataaacacactcaggcctattgtcaattctttttttaaaaaaatacaaaaaaacccgccgggattccggcaggtttgctgaaccatttgaaacggcgcggtcagtaatcaaaattacgctgcaaaatcatgttgttttgcaaggtctgcagctgcaatctcattcggtaaagctgctctctttgctgatcattcgcagataatgacagcttgtttaattcattcaccgcgttttcaagcatcatttgcgcttcactgtactcattatcattataatgctcttgttttgaagcggtcataaattgctcattcgcaaattcatatgcctgttcgcttctttggagatgttcatctactgattgtcttgttgccattaaacagtcctcctattgataatgtcatatcaatagtatttcttattccaaattaattctcacaagaaatatcaggtaattcattcacaagacagagatggcataaaatacgattaaatgtaaaacttaatcaagacagaatgaagtctttataaaaatccttcattttagaacgataacttaattcttcttttattaaaaacatcataatttttccacatcacccacaagatcttcggttcgctttaaattgttcaccattaaattatcttttttgtgtaaaacacccgggattcatcaaattttttagatctgtttttattagctttaattatcatcccgaaactaacaccaactataaaacttactcatccccatctaagactggaacagctttaaattttttcaacaaaccgttcaaaagtgaatcgaattttgaagaattaagataatagtatgttttattttgatttctcgtactctcaactaaaccttgcaatgtcaaaattctcatatgatgtgaaatcgttgcgttggttaaatttagctgttcagcaatctcattagcatacatttttttatgactaagtaagattaatatcttgaacttacttttatccgataaaagcttcaaaaaatcaatgatatgattaatctctgctttctctaatgtattttcaaatattttatcaactttataacccagtccaacataaatgttatcttcacttttcgtaatagttgcagtgcaaggtaaaagtgttggatatatattaatataattacaagataagtattccttaccttttaacgtactgattatcttttttggaaaatctatatttatgttttttaattgattcatccactcatctctgaatttaattaaattataaatcgcctcgttaagataaccattcaccaacattaatttattgcaaaattgatctacataagttttaggagatttcattaccttaaatatgatccacttgtattcgggctttatatttagattattaagtagctcaaataaactttccctatcatttaaatactgttgggtagatgtttcggttttaagatctccttgtaaataaattagagactctaaaatattttttcttatctcttcttctgtaactgcagacaaataatcaataatttcaaaaaaatctttcgtgtaaatttgtggtattttaaaaaatgttgtggctaaacaaaaaatatttgcattcctaacatctttgtagtcgcaaaagctgccaaaataaaaatttaaaaactcactatctaactcttttattcttttaagatcatctaataatacaaaatattcattatctaaattcaaacccaatttggttgtataatctttgaagaattcctcgtgttttaagaatagaatagaggatatcttgtcaaagaattctgaaacactgtcatttattattaaccgcactttttcacaccccataaagtctttttccacaaaggaaaacgttgtactatcttcatgccagacattttacatttttaatattatcaatcaaaaggaaactttcaaagaatattcatttctaattagcacttacctgactgagcattatcatgagcagtcctagatttattagacttgcttcacctcatgctaagtattctcctcatgtcatactcttcagaaatccttaatcatctcagctagtttacaggtccatttaagctcttattgagttatttcaagttacaaaattgttgaattataaaaatatgatttcgagataagtggatgaaaaaacaatttatgaataatattgacacctcttaagattgcatttatcatgtttttagatatatatcgaattttaatttagattaatatctgatggaggttgtagttttgaatttcaaaaaattaattatgttatctgcattattattaggtacattcatttcggtaatggacaccactatagtaaatattgcattacctaagatgctggattacttttcgagcaacctttctcaagtagcttgggtggctacaggttatactttagcttttgcagttttattagtaggtgcatcaaagctggcagaccattttggaagaaaaaaagcttttatgtttggattagcactttttattttgacatcagttattgcctgtttgagcacttcaattgaaatgcttatcacaattagagtgattcagggattatctgctgctttcattgtgccagttacaatgcctattgctttggccatcgttcctcaaaataaaaaaggattgatcattggaatctgggggctttctcaggattagcagctactttaggacctgtacttggaggattattaactgaaaattttaattggcaagctatcttcttcataaatattcctttaggcctgatttctctttttttagcagcattttttattactgagagttatgatgaaacagtgagtaaaaaaattgattacatggggattcttattttatccggagctctcttctgtttaacctttggctttgcaaaagtatctgatttaggctggtcatcaccattaattatctctctttttgtaatctctgtattattattctgtttgtttttctttattgaatctaaaattaaaaacccgatgattcccttatccatgctgaagatacgtacgtttagtttcagttctttcaccctctttatgcagggccttggattaacaagcggtacccttattattactttactcctcacgaatttaatgggaaaaactgaattagaagcggggttaattgtttctacattagctctatcatctatgtttacctctgtactttctggaaagctatctgataaactcgggggcatttggctttcgggtctaggtatgctcggtttaacaatcacaacatatttatatggatacatacgatacgacagttctgtaacaacggtagttattctgttatgtttgaccggcttagctttagggcttgtgataggaccggcaatgagttcagggatacggcttattcctcctgagaaagtaggtattgcctcaggtattcttaatatgatgcggacagttggacaagcgctaggcattgccatacttacatctgtgcttacaatgaatataaatgatcacacagcttctgcaaaaaaagaagccataacaattgtggaaaacaatcaggtttttgataaaaatgcaaaaaacgagataataactcacttaaagcattcagacagtaaaggtttcgatcgaagaaaaagtattgctgaattaaacaaaaaagaggaagaaattctttctataaccccggatccatataaagaaaaggtacaaaaaagtttcaatactcaaaagaaggaagttatcgctatccagaaaaaaatttcaaatttatataatgaaaaaataagtgacagttttaataatacattcaaagtaggcagtgtaattcttattttaggaattatttttgcattgttcagtgatatttctccaaaacgattaaaacaacaacagaaaaaccaggtagatattacgccttgaccgttccataattgtttcattgttccgccccatcattcatgctacaattttaggatgcatctgatgtgagggaggctttttgaacattgaacgagaataacccttttccttattcaaatacggaaaaacggtaccatacattaaattatcatctgcgggagcatttcgggcataaagtgtttaaagtcgcgcttgacggcggttttgactgcccgaatcgggacggcacggttgcacacggcggctgcacattctgcagcgcggcgggctccggcgattttgccggcaaccgggccgatgacttactcacgcaatttcacgatatcaaaaaccgtatgcacgaaaagtggaaagacggtaaatatatcgcatatttccaggcgttcacgaatacgcatgccccggtagaggagctgcgtgaaaaatttgaatccgtcctcaagcttgacggcgttgtcggcatgtctatcgcgacccgtccggactgcctgccggacgatgtcgtggaatatttggcagaactgaatgagcggacctatttgtgggttgaactcgggctgcagaccgtgcatgaacggaccgcactcctgatcaaccgcgcccatgattttgactgctatgttgagggtgtcaataaactgagaaaacacggcatccgcgtttgttcccatatcattaacgggcttccgcttgaaaacagggacatgatgatggagacggccaaagccgtcgctgatttggatgtgcaaggcattaaaattcacctgcttcacttattaaaaggcacaccgatggtgaagcaatatgaaaaaggaaagctggagttcctttctcaagaagaatatgtaagtcttgtatgtgatcagctcgaaatcattcccccggaaatgatcgttcaccgcattacgggagacgggccaatcgaattaatggtcgggccgatgtggagcgtcaataagtgggaagtactgggcgccattcaaaaagagctggaaacacggggaagctatcaaggaaagctcttcagaaagaccggggaggagaccgccctatgaccttgatgcacatcctccctttcagtaaagaattgctgaagtccgccgcacaggaaggtgatatcacggttgacgcgacgatgggcaacggacatgatacatattttctggccggccttgtcggtgagacaggacatgtccatgcctttgatattcaagcggacgcactcgctaaaacgaaggagcggctcggtgccgacttcggcccgcgcgtcacgcttcaccataaaagccatgatcaaataaaggcatcgctgcctgaagatgcgcacggtcgtgtggcttgcgccgtctttaatctcggctatctgccaggcggcgataaaagcattacgacaaacggtcactcaaccatttccgcgatcgaacagctccttgaactgctgaaggagaacgggctgatcgttctcgttgtgtaccacgggcatcctgaaggcaagacggaaaaaagtgcattactggaatactgcagcaatcttgatcaggaaaaagcccgcgtgctgagctacggctttctcaaccagcaaaacgacccgccgtttattatagcgattgaaaagaaatctgccggcaaataaagaatcggcctgtcataagcgggccgattctttttgtatttacttttcaagaaaaatcaattactatgaaataatggaaaaaagttcatcttttaagtgtaacatctgggaggagcggcaatttgaatattcttcgcatcatattttcaagtgttccctatgtgatgtttgtcatcattttatcaagacatttaggatttgagttcgcgaaaacctattactggtggtttgctgcattttttgtcatcgggctgatcggcaaattcgcaatgcaccttgcggcaaaaaagaaaccgttaaaaaaagagacagcgtaaaatgcgcatgtctctttttatttactgttttgcagcacgctgcgtgtataagcgggattgttcgtaaagacaccatctgctttttgtttcagcataataggcgtcagcgtatgctcgtcttccttatcaaaaaacacgtgcactttcatcttattgtgatgaatgcgcttcacgactgcttcatttgccaatttggcgttgatcccgactgtatcagcatacgttctgatggtttgcagctgcttatcatttatctcctcagcctcgttatcttttaataatcgaacaagaggaacttttttattcatagaacgaactttctttaagctcttcccgctaaaagactcaatgactgctttatggccggaaatcagcttatgtttttgtaatatgtcaatcagtttcttttccatcaccaggctgccgttgctttctcttgtctcaatatagtaattggcagtttgtccgaatttctgtatgatttcttctaatgttaaaatcttttctccttttcccgcattcagtttcttaatctgagccaaagacagatcatctgtcatccctttaccatctgttgtccggtctaccgttttatcgtgaattgcaatcagacggccgtccttcgtctcccgtaagtctatctcaatataatctgctttgtctttaatcgcacgtgcataagacaaagcggtatgttccggctcaatcgcagaagagcccctgtgcgctatcaagacaggatgatagccggcggaagcatgggtgacggagcagcctccggaaatggaaagtaatgctatgaccgctaaatactttaattttttcataaaattaaagtatcatattctgcaggcgcacacaatgtttcattcttcacatcataaataaaaaactgcgccgtcatgatgtacacgagaggcgcagttcacccattacgaacttttcgtccaagccatcttctgaaatttgcggtaggctcttccgttgatataaaagaaaaatgacgtttttccgcttgccctgatcagctttcgcgcgaggcggcccatttctttttggccggcgactttgtcatcggataaatagacgccgagcagccccctgttgatcagccggtgaaaattttcatgcggaatgccttgcaaatgttcatccgctttttcaataaaatgctgcagtctctgcatcatttcttcatgagactgataatacgtacagaaattcagatcgccttcaagcagatcttcttcctggtcaattaaataatcaagcagtatatgcaggccttgtatgtacggaaaataactgctgcggattttctcagcggtatgttcgttaaaatcaggctggaatgagtaagcaacgagacagaaaatgcctaacgtcgatccggcgcaggccgagaattcaaaccactccatttccggaagctgcgacctgtactgctcaaaccaggctttaagcctcggaacccgttcatgctcaacgacatgcttatgaacctgaagatcgcaataataatcacacagttcaagcaaataaggtttaatgataccgtaatgttctattgacccgagcacccgctggcatgttctgaccagttcatgaagataaccgccgtcatcccgctcctctctgtactgatagtacggccgcacctcggcaccgaccgtcagcgcgtcacgcatggaaagatgaagcatgcggaagtcctccggatcaagcgaggtgctgcggtcgcacagattgtccagataatcactgattgtctgatacgcgatgataaattgcacgcatttctgtttctgctctcccgaaagcagggctaaaatgccgcctccttcacaatgaaacgacttatcgcggatacttgcggccgcctgctgccgcagttcggtatttttaatggaatctgatttttcccgccacatgttcaattcctgatgaacgagcggaaaaatttcccgatacacttttgccataaggttaaaaggatgttccggtactgtcaacatatgcaccccagcgaattcaaatatactgatctgtaaaggcttttgccgccttaaacacagtttctctttcaggttcattaaatatttcatgataaagcccttcccattcccggtacgatttattatgggaagccacaccggaaaaccatttgcggactttcattttatcgacgattttgtcatcaccgccctgcataagcaaaagcggcacctttaaaaacgcatcagtcggcaccatagcggcatcaatggtttttaaaagctctctgtaccatcttacggataccttcgtgacatataaagaatcgttttgatccgcttcaatcatatccgcattcctcgttgccatatcaggtgataagccggaatccactctgagggacggagcgaggacgttcagtcctttagacgcaaaatcaaggactttattgacttttatttgcagacccagacaaggtgatgataaaatgagtgccgtaatgcggggatttctctgctgcttaaaccattctatcgcaatcagtccgcccatgctgtggcccaaaaggaaaacgggcgcttcaagcgttctcgctttatcaatccatatatctacttcatcaatgtattcttggaaagagcgaatatgccctcgggcgcgggtcgacgttccctgaccgggcaaatcgcccatcaccacgttatatccggaagatctccacatttcaacgagccatttataacgcccgtggtattcgctcgccccgtggataatgacaatggtaccgacgggcctgtctgctttccaagtccacatgcagttcacctcttacataaatttagagaaagaaggatgagacatgataatctacccttataaacaatttacgcctgacgtacatcctgaagcgttcattgcggataacgccgtcataacgggcgacgtcgtgatcggagaacaatcgagcatttggttctcggcagtcatccgggggatgttgcgccgacaaggatcggaaaaagagtcagcatacaagacttgagctgtctgcatcaaagcccgaaccgcccgcttcttattgaagatgacgtcacgatcggccatcaggttacactgcacagcgcaatcatcagaaagaatgctttaatcggtatgggctccgtcattcttgacggggcggaaatcggagaaggcgcgtttatcggcgccggaagtctcgttcctccgggcaaaaccattcctcccggctgtcttgcgttcggccggcccgcaaaggttatccgccggctgacagaagaagacatacgggacatggaaagaatcagaacggaatatgttgaaaaaggccgatactataaaacaatgcaagagaaataaaaaagatcagctttgttttactactgtaccatttttcaaaatattatttaagtaaaaaccatttgcattctcccgattgtcaggaaacagaagcaaaatgttcaggaatttgttttattcttcccccttttacccgatcctatgaaaaaagagcccatttcagcgggctcttttttacgctttttcggcgaatgtctgtccgttttccagatctatgtcttttcttttatggaatcctttgccgtaataggcggctaataatatgccgaaccagacaggaccgatgatgacggccaccctggtctctgcatcaaaagccatcagcacaacgacaaaagccagaaatgccagcgagatatatgaggaaaaggggtataaaggcattttatatttgagttttttccgttcttccggctgtaagcttttacggtatttcatttgggaaagcaaaataatcgaccatgtccaaattgctccgaacgtcgcaatgctcgtcacccacgtaaacactttcgccggcaccacgtagttcagcaaaacgccgatgcataacgcacccgctgaaaccaataccgcttttcccggcacaccgccttttgtgaccgtaccgtatgctttaggcgcttcattttgctccgccagattgaacagcatacgccccgtgctgaagatcccgctgttgcaggaagaaagagccgccgtcaatacgacaaaattaatgattccggctgcagcgggtattccgattttttcaaatgtcaaaacaaacgggcttccgcctgaaccgatttcctgccacggataaattgacataatgacaaacaaagctccgacgtaaaaaatgagaatgcgccaaaaaacagtatctatggcccgcgccagtgatttttccggatttttgacctcaccggctgtgacaccgatcagctcaatcccgagataagcaaacatgaccatctgaagcgacagcagcacccctttaatcccattcgggaaaaagccgccgtggctccataaattgctgattccgagcgcaacgcctccgtttccgagaccgaatacgatcatcaccagaccgatcgcgatcattgacagaatcgccaagactttaatgagcgcaaaccagaattcaagctcaccgtacgctttgaccgccagaaagttgacagccgtcataatgacgagtgcacaaagcgcccagatccatgacggcacgtcagggaaccagtagcccatataaatgccgaccgcggtgatttccgccatgcaggtaacgacccataaaaaccaataattccagcctgttaaaaacccggcaagcgggccgatataatctctggcataccggctgaatgaaccggctacaggcttttgaatcgccatttcccccaatgcccgcataataaaaaacataatcagtccgctgcaggcgtaagcggctaaaatccccggcccggcaagctttatggcagaagcagacccgagaaacagcccgactccaatcgcggcgcccaacgacataagcgagatatgccgctcttccaagccgcggtgaagcgttttttctttgttttgcataactctccctccccctgattttgacaaagaaacaacaaaccgagacgaaatagccagaaaactttttccggaatctacccgattagtcctattataacctttttctgaatattgcgtaatactttgtcgaaaacagagcggaatagacggtttacaaaaaacaatagaaaaaaggctttcgataactcgaaagccttttggattaaacgaaaatgacttctttcggctgatgattcagctcttccggcaccagtcttttttcgacattgatgctgtgccagatcatgaagatcagcacggtccagattttgcggctgttgtccgctctgtcggcacaatgatcttccagaagctgaaggacataatccttttcaatataagcgtctgtttcactttcgcgaatgatgttgcgaacccattcgttcatttcatttttcagccagtggcggatcggcacagggaagccgagttttttgcggttaagcacatgatcaggcactaccccttcagcagctttgcgcagaaggtatttcgtcgtgccgtttttcgttttcaattcatccggaatttttgaagctacgtcaaacacgactttatcaaggaacggcacgcgcagttccaatgagttggccatcgtcattttgtcagcctttaacaggatgtcgccgcgcatccacgtatggatgtcaacatactgcattttatttatgtcgctgtatgaacggctttccgtaaagtacggcttcgtgacatcacggtatgaaagctctggattgtaatgtttgagcagctgttttttcacgggctcttcaaaaatcttcgcattaccgatatagcgctcctcaagcggtgtgcagccgcggactaagaggcttttccctctcattccttcaggcatgacggacgccacatgaagaagcatttttttcagaccggacggaatgcgttcaaacggtttaagcgaaagcggttcgcggtaaatattgtacccgccgaacagctcgtccgcgccttccccggataacgcgaccgttacatgctttttcgcttctttcgcgacaaagtacaaaggaatcgccgccggatctgcaagcgggtcatcaaagtgccagacgattttcggaagctcgttcatatactcctcaggagaaatgactttgctgatattttcaataccaagcgcggcagccgtttccttcgctacgtcaacctcactaaagccctgctgctcaaaaccgacggaaaatgttttaaggctcgggtgaaattctttcgcaactgaaacgataaaagaagagtcgataccgccggatagaaacgaaccgacaggaacgtcacttctcatgtgaactttgacagagtcaaagattgcgtctctgacttctttcaccaatttatcttcatcagactgaacaggcttgaagttcgctttgaaatatgttttaaacgcgatgtcgccttccgggcggatcgtaaactggctgcccggctcgacttttttcacttcagcgtcaagcgtgctcggttcaggaacgaattggaaagacatatattgctgtaaagaagctgtatcaagatcaataccgttttgagcggccattaaactctttctttcagatgcaaaatatactttgtccccgatggttgtgtaatacagcggtttaattccgaacgggtctctcgcgccgtacatgacgcggtcagctttgttccagattaaaaacgcaaacattccgcgaagctttgaagcggcttcttctttataatgacggtatgtcgcaaggagcacttcggtatcggaatctgtattgaaagtgtagcctttcgcttcaagctcttctctcaattcaatgtagttatagatttcgccgttaaaaatgatccaatatttttcgtcttcatatgataaaggctgtccgccgttttctacgtcaataatactgagccgtctgaagccgaatccgacgtgctcgtcatgataatacccatcgctgtcaggaccgcggtgaacgatcatttggttcatttgtttgattagctcttcttgatctgcggtttgagttaatggatgcttattaaaaacaccgacaaatccacacatagtatagcctccataagtgtaattttctaattggaccccctttttatagacgctttgttacgccattggtttcacgctatgtaaaaaataagcatggcagcatctacaaaaagggaaagccgcttaagtaagcggctataaaattattctcctagtgcttctttgcgaagcgcatccgccttgtcagtacgctcccaaggaagatccacatcatgacgtccgaagtggccgtaagcagctgtctgcttatagatcgggcggcgcagatcaagcattttaataatgccggcaggtctcaggtcgaagttattccgtacgacttcgatcagtttttcttcagaagcttttcctgtatcaaatgtattgatggaaatagaaacaggctgtgccacgccgattgcgtatgcaagctgcacttcacaagaatcagcaagacctgctgccacgatgtttttcgctacgtatctcgcagcgtatgccgctgaacggtctaccttcgtcgcatccttaccggagaatgcgccgccgccgtgacgtgcatatccgccgtatgtgtcaacgatgattttacggcccgtaagacccgcatcaccttgaggcccgccgattacgaaacgtcccgtagggttgatgaagtattttgtttcttcatcgatcagttcctcaggcacgacagggttaatgacatgctctttcagattgcgctgaatctgctcaagcgtaatttccgggtggtgctgagttgaaataacgatcgcgtcgatgcggaccggcttgttgttttcatcatattcaacggtaacttgcgttttgccgtcagggcgaaggtacggaagaatgtcttctttgcggacttcgctcaaacggcgggctagtttatgcgccaaagagatcggaagcggcataagctctttcgtttcgttacacgcataaccaaacatcaggccttggtctcccgctccgattgcttcgatttcagcatcgctcattgtgccttcacgcgcttcaagtgcctgatcgacacccattgcgatatccgcagactgttcatcaattgatgttaaaacagcgcaagtctccgcatcaaatccgtatttggcgcgtgtgtagccgatttctttaatcgtttcacggactgttttcggaatgtcaacgtatgttgacgtagtaatctctccgcttaccagcacaagtcctgtcgttacagatgtttcgcaggccacgcgcgcgttcgggtcattttttaaaatctcatctaagatactgtcagaaatttggtcacagattttgtccggatgaccctcagtaacagattcagatgtaaatagtcgacggtttttactcattcacttttcctcctgaaaaaagatcttttgcaagaccttctcatatgatacggaactcgctccctcttaatacaatgtcatactatatcagagaatgttaattggcatattttatgaaataaaaaaaccttttccactcgaggaaagggtttggtctgtgtgcctttcactcttatcgctcaaggaaaatattaaaccttgcatcaggttagcaccttggtttcccacagtgttttcacctgcttttttacagagaaaccggttgctgggcttcatcgggcctgtccctccgccagctcgggataagagtatccgctcaatgaaatatcttatcgtaaaagggcggaaagtgtcaatatgaattaaagcgattgcgcgcctttatttcgggaagcaatggaaaaacacaaacaaaaaaccgtaaatagtatagactattttcagatatatgttatactaattccacattcagcgaaatacaaataaaccggcaaaggaaggtttttatgaaattagttgatttaaccgcagatcttcaagcattacttgcaagtccgaatgtgcatcataatttatcggctccaaaacttaccgaaaaagtgatcagccgaaatgaaggaacgctgacatcaacgggcgccgtacgcgccactaccggcgcatatacaggccggtcacctaaagataaatttatcgtccgtgaacaaagcacagaaaatcaaattgattggggcgcggtgaatcagcccatttctgaagaggcgtttgaaaagctgtacgccaaagtcgtcagctacttaaaacagcgggatgaactgtttgtgtttgaaggattcgcgggagcggatgaaaaatacagactgccgattacggtcgtaaatgaatttgcgtggcacaatttattcgcgcgccagctgtttatcagaccggaaacggatgaaagagacccgcaagcgcagcctttcaccattctctcagctccgcattttaaagcagacccggagacggacggcacgcattcggaaacatttatcattgtctctttcgaaaagcgcgtcattttaatcgggggcaccgaatacgccggagaaatgaaaaaatcaatattctccattatgaacttcctgcttccgcagcaggatatactgccgatgcactgctcagccaacgtcggtgaaaaaggcgatgtcgccctgtttttcggcctttccggcacagggaaaacgacgctttcagccgatgcggaccgcaaactgatcggagatgacgagcacggctggtcagattccggcgttttcaacattgaaggcggatgttacgctaaatgtatcaatctgagcgaggaaaaagaaccgcagatttttcgtgcgatccgcttcgggtctgttcttgagaatgtcgtgcttgatgaaaaaacgggtgaagcggattacgacaattccttctacacggaaaacacaagagccgcatatccgattgagatgatcggcaatatcgtgcagccgagcattgccggccatccgcaggcgatcgtctttctaacggcggacgcattcggcgtgcttcctccgatcagcaaactgacgaaggaacaggcgatgtatcacttcttaagcggatacaccagtaaactcgcgggaaccgaacgcggcgtgacatctccgcaaacgactttctcgacgtgcttcggttcaccgttccttccgcttccggcgcatgtatatgccgaaatgctcgggcgtaaaatcgacgaacacggcgttcaagtcttcctggtcaacacaggctggaccggcggagggtacggagtcggagaacggatgaaactttcgtatacaagagcgatggtcaaggccgctattgacggcagactgaaccagactgacatgacggcagacagcattttcggcctgcacagtcccgttcatgttccgggcgtgccggatgaagttcttcagcctgaaaacacatggagcgataaacaagcatacaacgaaaaagcgctgtttttagccaatgagtttaaagaaaactttaaaaagttttcccatgcagactcgattgccaaaaccggcggacctctcgtgtaatcaaaaaagccaagggcgtttatgccctcggcttttgttttttcagtttgtcgaatgaagcgaagtgagtctgtatgtaatgcttgtccggccgttcgcccattcgagcttctggacctcgccggtgccggatttctcgccggttttcgttttgcgcacgtccatcggaatatcaagaggatagacgcggtagccctctttctccaataaaaagatattttcctctatccgtttttcattgccttttgtcacaatcatggtattaaattcaacaggcattcccaaaatgaaaatcccctttcattctcttattctttattatcatatcataaatcaggcatcttaccgtgtcttcatccattccgccagccgccggacaatgcgtctgttttcctgcggcggaaaataatgcgtaaaaccgctgtaataccaagtttccaccggtttccccgcctctttcagcttgtcctcgatcatccgggcgtgttcgatcgaaacattttcatcattctctccatggatgagcagcacaggggcctgaatgcggtctgctttttcaaacggcgaacgccatctgtattcatccggcacctttttcggcgtgccgccgatcacccgcttcatcatccgccgcatatccttccgctcttcataagtcagcaccatatcgctcacaccgccccatgaaacgagtgaagccgcttgatgccccatttcaatcgcggtcaaaagccccatgattccgccccgggaaaaaccgaaaatatgcacccgcccttccctgacgttcggatgctcccgaagcaggcggaaagcggaaaacgcgtcctctctgtcctctcccgcaaaatcttcatttccctcgccgccctggttgcctctgtaataaggcgcaaacacgacaaagccttgggaagcgaattgaacgattctcccggggcgtaccatgccgacattttttatgccgccgcgcaaatataaaaaaccgtcatatgttcccggcgccgcaggctcggcaaggagcccctttaccttcagcccttctgactcatagcataccgcaaagaggcggacatgcggactcggagacgggaaccttttcttttctaccagcaaaacaatgcgcctccttagatcatcagtttttttattctttcccaacgtgaatatgggcactcacacattttttatacccatcatacgatatgtaaagcagaaaaggttattttaacgcttaaaacaaggaggttacaccgtgaacaaatggctcaaagcgggctgcgtttttgtcatatgcgcctttttcctgctcattcttccggcttgcagacaggaagaaagtctgacgaaggtaaaggtggcggaagtcacacactccatcttctatacgcctctgtatgtcgctgaagcaaaagatttctttaaaaaagaagggctccaagtgtcacttcaaacaacatggggcggagacaaaacgatgacatcgcttttgtcaaacgggtcagacatcgcgctggtcggttctgaaacatccatttacgtggaggcgcagggagcaaaagatccggtcatcaatttcgcgcagctgacgcagacggatggcacatttctcgtgtcgcggaaggatgagaaatcattcaaatggaacgatttaaaaggaaaaacatttctcggccagcgaaaaggcggcatgccccaaatggccggtgagtacgtcctgaaaaagaatcacatagagccgaaaaaagacattaacctcgttcaaaacattgatttcgccaatatttccaacgcattcgcatccggaacgggtgattatgtgcagctgtttgaaccgacggcatcccaatttgaaaaagaaggcatcggtcatatcgtcgcatccttcggagaagcttccggccaagtgccatacacaacctttatggcaaaagaaagttatttgaaaaacaatgaaaagacggcggaaaaattcacccgcgccatctatcgcgcccagcaatgggtggaaagccatccggccaaagacatcgcaaaaacgattcagaaggaatttgccgatacagacccggccattatcgaaacatcgatagagcgctataaaaaacaaaagtcattctctgcagacccagttctgcaaaaggatgaatgggaactgcttcaatctattatggatgaagccggagagctcccgaaacacattccgtacagcaaactcgtcaacacaaaaatcgccaaaaaagtcacctcagaacaataggaggaacatgaatgtcttttttacatgtggatcatgtaacacatacttatttctcgcttaaagaaaagacaaccgccgtgaaagatatacattttcagattgaaaaaggggatttcatctcctttctcgggccgagcggatgcggaaaaacaacactcctgtccattctggccggccttatcacccctgcgcaaggccgggtgctgatcgaaggaagcgtgccgaaccataaagaacaccaaatcggttatatgcttcagcaggattatttatttccttggaaatcgattgaggaaaacgtgctgctcggtttacacatttcaaaaacattaacagaagaaaaaagagctgaagttctcagccttctgcctaagctcggattaatcggcgttgaaaagaaatatccgaaagagctctcaggcggaatgcggcagcgggcggcacttgccagaactcttgcgccggaccctggactgctgctccttgatgaaccgttttccgcgctggactttcaaacgaagctttctttggaaaaccttgtcttcagaacattaaaggattttcaaaaaaccgccgtgctcgtcacccacgatatcggtgaagccatcgccatgagcgatacgatctatttattttcgaatcagccgggcaccatccaccaaatattcaccgtgcctaaggagctcgcggctttagatccgtttgacgcgcgtcaggatccggcctttcagccgctgtttcaaaccatatggaaggagctgaattcccttgaaaaacagcagcggcacgattgaacagcttcatcagcagtttaagaaaagacaccaaaaagaaaagctccggatccgtgcgtatcaggccgccattttcatcgtattttttgccgggtgggaaatatcgagcagggcgggctggatcgatccgttaatcttcagctcaccctccgccgtttgcaggcttttagttgaaaagattgcggacggatcccttgcggcgcacatcggcgtaaccttaggagaaaccgttctcggctttttgctcggcacgcttctcggcacatgcctcgccgctctgttatggtggtcaaacagactcgcccgggttttagacccgtacctcgtcattttaaacgcgatgccgaaggtcgcactcggaccgattctcatcgtggcactcggaccgaatttcacaagcattgtcgccatgggagcagtcatcagtgtcattatcacgacaatcgtcgtctttacggcttttcaggaagtggatgaaaactatattaaggtgatgaaaaccttcggagcgaaaagaagcatcatgtttaaagaagtcattctgccggcatgcgcccccgcgattatttccgcgcttaaagtgaacgtcggtttatcctgggtcggtgtcatcgtcggcgagtttctcgtttccgaaaaaggtctgggctacatgatcatttacggattccaggtcttcaatttcactcttgtgttcttaagccttctgatcatcgcgatttttgcgacattgatgtatcagggagtcgaactgttagaaagaaaatggacgaaaggaaaaatataaaaaagacccgtgcgtaagcgccgggtctccgttttttatgattgaaatacgccgtcctctttcagctttttcagactgatcggaagcaccgaatctttcataatgaaactgaattttttatttcgggggagattctccggcagttcgctgaacagcaccggcccctttgtttcaaaatagtcagcctgtttttcaagcttttcaatatcggcaaaataaatattcttcacgattaccttttccctgccgagaactttatactgtccgacgtacttcagatgtcttaccgcggcgccggtttcttctttcacctcgcgcagggccgcttcctccgcacattccatcggctccacttttccgcccggaaattcaaacccccggtcttcgtgctcagtcaaaagccacttatctccatatcggcatatgacccatacatgcttcgggctgtctgaaaaaggctggtgttcaaaggagagctgaacagtattctgataatagtctttaaactcgtacatgtttatccctctaatccgttccttcatatcttccatacatcataccacagttgcgtttgttcggaagccctttatcaaaaattcagaggaaaaccatcatacccgctagtatagcctcctttgaagcaaatgttacggtttgcgcttgaatttatttttcaaagtatccaataggtcgacgagcacctgcggaaccgggatgcccagcgagcttgccgtaatcacgatctgaaccgattcgtataagatataaaacataatagccaaattgcggatggcgccttctgaatgaagcagctgatcaaaaaaatggcaaactgagactaatgccagggtcacgatttttttgaccagccgcgcaaaaagctttcttgcgctcagctgctgcaaaagagattcttttaagcttgtactgataaactcaatcgccatgaccgatagcaaaatcagaaacgaatactgaaaaccgccaaagaaaaaccccgctgccgacacgatcactgcaaaaaacgaaaagatgccaaagtctttgcccacttgatccaacatcctttcacagaaacggccttacattattctatgaaaagtgaatggaacggactggatttttcagaaaaatggacaacacctctcttcggcagccaaataaaagaccgagtgctttatagccccggtcttcccttgttgattatcctaaatacgctttcagcatccaattatgtttttcgatattctggtgaatggcaagcagcatatctccggtcgtttcgtctccgacctcatctgcgagatccatgccgcttttcagctcttccgcaatgacagtgaaatcatcataaatgttctgtaccatttgttctgcgctctcattgccttccgcctcttttatagaagcactcttcaatgattccgtcattgtgccgatcggcttgccgttcaatgccagcagacgttctgccagatcatcaatatatgtagccgtttcgttatacagctcctcgaacttttcgtgcaatgtgaaaaagtccttccctttgacgtaccaatgatagttatgtaatttcacatacatgaccgtccagtttgcaacttgtttattgaccgcttccaatagtttttctgacatgcctatcttcctcctttgatttactattgatataccctatatatcgtgtgttaaaacataaatttttagcccttgattttacggatggaaaatatgttatgatttgttaaaaaggagggatttcatgctgcttcttctgagcttcggctttcttatcgtgctcgccgtgctgcttttatccatctggtcgactgtaagagcttataacgtaaaacatacgattgacccgccggaggacgcatcaaaaggcttgacggataaaaacaatccttaatgatgatgcgtctgttcctcatggccggaggaatcatcggcagcttcagcatccccgacacgtacttttacagtcggcatattatgctgctgttttgccgttacgtgggattgaacggtatacacaccctcttcatcaaattcagtccgcaggtgatacgcccctttttcctccttggccttgcttgttttgctgctgcctttttttccttctttccatacttcaaacatgacttcatccgcatccgtgacacgcttgccgccgtaaaaaacctccgccttgtattccgttttttcatgcggtgctgccgtttccggtcctgtaagcttgacctcaagcgctttaggctcctcatccgcggcggttttgtccgaattgcccccgcaggaagataatagaaataccataccgcacatacctgccaatacagcccgtttcatcccatcactccttcatgtttgcttctattttagcaaacgcttacacataaggtgtgacattttttagaaatatgtaaaaaagcctttttgcatgtcagcaaaaaggcctgttttttatccgaacactttcagcaaatcttctttatcttgtgacagccagaaacgcatcagccgtttcgcgccttctaaatcatgaagtttcgcctggccgcactgtttttcgttggccgccggaatctccgtaatatcgatggcttctttcagcgtagcgtctagcaggtctacaatttcttccgctgtaggctcgccgctgacaacaagataatagcctgtctggcagcccatcggtgagatatctatgatgtcgaagtgatcgtatttctcagaatgtgtgcgaatcgtaaacgcaagcaagtgctcaagcgtatgaatcgtatccggcttcatcgcctgtttgttcggctggcagaagcgaatgtcaaacttattcacgacgccgtctgttccgactttatgcactccgcaatgtcttacatacggagccacaaccgcattatggtctagctcaaaactttctactgaaggcataatggcactccctttttttcagaatatgcatccattataacacagttttccgataagaattgtggcgaaagcttttcaatctgaaattttttttctatactagcatcagaaaggtggttttttaatgaaaaccataatgattgcgctcatccgcggataccagaagttcatctctccgctgacgccgccgtcatgccgcttttatccgacgtgttcacagtacggaatcgaagccgtcaagactcacggcgcattaaaaggcggatggctgacactgaagcggattttaaagtgccacccttttcatccgggcggtgttgatcccgtaccggacaaaaaacgaaaacattagtccatatgctggtagccgtcgatcaccagatcaagtttaccggtttcaggatcaatcaccagaccgtgcaccgggacattgtcagggaatagcggatggtgtttaatgacgtttacgctgtctgtaacactcgcttctactgaatcaaagcttttcagccattgatcaagatcaacacctgagtgcttcagcatgtcaatccgctctttcggaataccgcggtcgataattttatcaagcatatcctcgctgttgattttgctcatgccgcaatcatggtggccgataacgcagacttcatcagcgtttaattcgtatacggccactaaaaggctgcgcatgatgcttccgaacgggtgggcgacaagcgcgccggcacttttaataattttcacatcgccgtttcgcatgttcatcgcatgcggaagcaattctacaagacgtgtgtccatacaggacaaaattgccatctttttatccgggaatttagatgtttggtatttttcataatctttgtttttagtgaactgctcattaaattgcatgatatcgtttagaagactcatcttggtgtttcctttctgcttttttattcacaatataacataaggcgggtcatttcgtcactccccgcacgagatgataaagtgctcaataaataagacaaaccctattgggcttgtcttatttccccatattgtattttttgttgaactgttcgactctcccgcctttttcgttgaatttttggcggcccgtataaaacggatgcgtatctgagctgacttccactttaatcagcgggtatgtttttccgtcttcccactctgccgtttcctctgacgttttcgtagaatggcttaaaaagcggtagccgctgttcacatcttgaaaaatcacttggtggttatccggatgaatatcttttttcatggtgatctccctttcttaaatcgtaataattacgttttattctaaaccttaaataggcgcttgtcaatcatatatgccctgatcccttgatttctaaaccctgcacatatatggaatcggaagaataatctaatcgcttcagcaaataatataaccacattacataaaacggtaatttagaaaggcggtttatgatcgtggatgatttagtattagccagaagtctgttcgggacaaccatgggctttcatattatttttgcgacgcttggtgtcggcttgcctctgatgattttaatggccgaattgatttatcaaaaaacaaaagatccgcattatgccattatggcgaaaaggtggacgaaggcgcaggctgttctgctcggcgtggcgataccgaccggaacgatcgcgggtacacagcttgcccttttgtggcccggattcatggagatcatcggcagggtgatgtcacttccgtttcagattgaaatttatgctttctttatcgaagcgctgtttatgtccatttatgtctacgccgctgaccggctgactccggcgatgcgcatcattgccgttattttcgttttgatcggcgccgcggcatccgccgtcttaatcacaaatgttcacgcatttgaaggaacgccggccggctttaaaattttaaacggcaaaatcactgacgtcgaaccgtgggcagcgttttttaatccaagctttttcaccaccgcgggccatgtcgtactgacggctttcatgaccggtgcatttatcgtcgcgtcagttgcggcttataaaatgctgagaacgagaaaacaggagcaggtataccgctttcaccgaaaagcgctgctgctcgctttaacgatcggcgggatattctctattattgcttctttaaacggtcacgagtcagcccagcttctttacgaataccagcctgagaagcttgcgggcgcagaagggctgtttgaaactagatcacacgctccgcttgcgatcgggggttttactgatgcaaaagaagaaaaagtaaaatgggcgatagaagtgccgtgggctttaagctttttggccgcaaacagctttgataccgtcgtcaaaggattgaacgcgtttccgaaagacgagtggccgcctttattcatccatacactgtttaacggaatggtcggcatcgggatgctgctcattttgtactccatcatcggcatcgtgtggagaaaaattttaaagaaagacagctttccgacttggcttttgattttatttttaaccgcaggaccgctcagtctgatcggaattgaattcgggtggatattcgcttgtacggggcggcagccatgggtgatttaccatctcctgaaaacgtctgatgtcgtcacgacaaccggttcaatcggtttgctgttcatcctgttcacagtggtttacgccattttggcagccgcagtcatttatgtgctgctttattatttccgcaaacatcctgttgaggaggatgtaaaagcggcggaatcctaacaatagaaagggctgaattgaaatggacattaccatggatgctctcattgcgatatcaatcgtatggggcttcgtgtttatctacgcggtcatggcaacgatggacttcggagccggcttttggtcgatgatatatttaaataaagaacaaacaaaggcgacaaacatcgccaaccgttatttgtccccgacatgggaagtgaccaacgtctttatcgtcgcgatcgttgtcgccctattcagcttctttccaggggcaaccttcgtgctgggaaccgttttattgatcccgggaagtattattttgctgctcttagccatccgcagcggctttctcgtcttctccaatacggcgaaggaaagaaaaatcatgagatatatctccggaatttcaggcttcattattcccgctgtgctgattttggtccttccggtcacacacggagggtttattgagaagacgggcggagtgtatcacctgaatttggcaaatgtctttacaagtcttaatgcgtatgcgtttatcggctttgccattttaagcactttatttttatcttcactgcttctggccgatttttcaaatgttgcggaagaggagcatgcgtaccgcatctacagacggagctctttaataacagggccgctgtcgcttctgtttgccttcttcattatgctgacattacgctctgaagccggctggctgtatacggggatgatgaaagacaagacatggctcattctgtctgtcattacatttatcattgccggcgtggctctgtttttgccgaataagcgcttcggccgcaacctcggcaaaccgagaatcgccatgatcgccattgcgctccaatactttctggcaagctatgcatacggacgggctcatcttccttatatgatttatccggatattacggtcatgtcaggatttacggagccggcaaccttcagggcgctgtttatgacgtatatcgtcgctttcatcattttgttccccgggttttatttcttctggaagctctttatgaaagacagacgttatatccgccaggaggaataacaaaaatcagggcggctcatactaatggcgtaccttttatcttggaggggagccagcatggaccaaaaaattctgtgtgaagtcaataactgttcatattggggcagaggaaacaaatgcacggccgacgctatttatgtggtcagccatacaggcgaaaccgctgaaaaaagtgaagaaacggattgcaaaacctttaaaccgcaagatttataaaagaaaagagctgttttatacagctctttttcatttccgccgcaagcctccctgagccggagaaaaccgcgcggatgagaagcatggcaaaaaggcggttcggcggcaaatataggcggcagacggtacaatcagtatcgcattcatgacaagctcagaattttttatcaagatgtacatgtttgccccagccggaaagcagcacctgcgttgtaaagccggcactgtttgaagaataaaaaaatcatcgcatccgcctattaaaaaaaccggctgatacagccggttcaaacgggggaaggggtgataatgaacagcttcaatataacagcagcgtacaggcagctcaactcgctgaaatgtctttttatcagttgtttgtcgtaaaaacgtccatttgggtgacgtattttctcattatttcctgattgacttcaacacctagtccgggaccgtccgggacagagatgaatccctcttcgatacggatatcgggagtgacaatatcctcctcccagtatcggtctgatgaggaaatatcacccggtatcgtaaattgcggcagcgaagcaagcgcgactgtctgcgctctcgaaatgccggtttcaaacattccgccgcaccaaaccggcatgtgatgctctctgcataagtcatgtatttttaatgcctctgtcaggcctcctacacgcgccggttttatgttaatgattttacagctcccaagctcaatcgcccgccttgcgtcatcataagagcatatgctttcatcaaggcataccgcggttcttaagtgtttctgcaggtggcggtgatcgacaatatcatctgcctgaagcggctgttctatcatcatgagctggaattcatccaactctttcagcctgctgatgtctttcagttcataagccgagttggcatccgccatcagcggcacgttcggaaaacggctgcggatggctctgaccagatcaacgtcatggccgggctgaatttttatttttatacgttgataaccttcttttacgtattgctcaatttcccgaagcatctcatcagccgaagccagacccaccgccacgccggcgggcactttatctcttttgccccctaaggcttctgcgagagatatcccctttttcttggcatatagatcccacacggctgattcaagccccgcttttgccatgcggtttcctttgaaacgcgcgagactgtcaggcacttctgacggatggaaaaacgcgcggcctacgacatttgggatgaaaaaatctctcagcatatgcgcgcatgtctgaatcgtttcttctgtataccacggagaagaaaacgccgatacctcccccagccggttctcccggtttcgtcgatcgcttccacgatcaaaaatttacgatcctgcagcgtttcaatacttgttttaaacggttttttcagcctcatacttacatgataaagggtgattttttcaatcttaatcatgacaattctcctttacgaagctcattcagccgatgcctcatcagtttattggacgcgttccgcgggagcccgtcaaccttgaaaaaagcagctggtattttatattttgcaagccgctcacggcaaaaggcggtcagctcctcagaactgacagaagaagtcagcacgagaaaagcatgcggcactttcccccacttcggatcttcggctcccgaaacaccggcctccgctacagccggatgggcaagcagcgccgcttccacttctgcggggtagatgttctctccgcctgaaatgatgaggtccgaccgcctgtccagcacgtataaaaacccttcatcatccaaatagccaagatcgcccgttttgaaccatccattatgaaaagcggcctggttcgcgtcgtcacgatgataataccctttcattacattcgggcctttcaccgtaatttcaccatgttcaaacggcgcacaagggtttccgtctttttcaattctaatttcgcatgaaaacagcggtttaccggccgagccgagcttgtccatgctgaattccggagaaagtgtgacaatctgtgagcaggtttcagtcaagccgtaagattggaataccggaaattgtttcctgcggcattcttcaaggagcggcagcggtgccggacccccgccaagcagaatgcagcgcagtgattcaggacattgttcagtttccgcaagcaggcccgagagcatggtctgcaccgctgaaatgatcgtgacctgatgggagctgatgctgtccagcacatcagtgacagagaatttttgatgaagcacgacgggcatgccgtaaatgaccgacttaaacagcgcagacagaccgctgatatgaaacagcggcagcgcaataagccagcggtcccgctccgtgacccccagattcagcgcagacgatacagcgctggaataatgattaccgaaagtctgctgcacccctttcggccttcctgttgttcctgacgtatacataagagtcgccgtatcatcaagcgttacataagcttccggctccatgtcacccgcctcttcagcctgcagctcgtccacatctgcggtggcgaccgcagattcatattcttcgcggcaaaaaccgtcctccgtcaataaaagctttgcctgtgaatcttcgagctgaaacaaccgttcctgttttgagagcttcgtattcaacagcacagcttccgcccctaataagaagcaggcgtgaacggcataaaccatttccggtctgttagaaagcaaaatcgcggccctgtctccttttttaagcgagcagtatttggacagccgcgcggccatttgtttagaagcatgatataattctctgaatgtcatctgtttgttttcaaatatgagagcgattctctccggtgtcagctgagccctttgaatgagccaattcggctgttctgtcagcatgttatcatctccgaggtaaaagtactgtttttgaaaagaaaacagcttggaccagagcggctcaagctgtttcgtagtgtcatctgatcacggaaaacgagggaattgaccgaaatcgggactgcgtttctctttaaaggaatcacggccttctttcgcttcgtcagtcgtgtaataaagaagcgttgcatctcctgcaaattgctgaattccggcgaggccgtctgtatcagcgttaaatgccgctttaaggaaacgaagggctgtagggcttttctcaagcatttcttcacaccatttaattgtttcctcttcaagtttctctaatgggacaaccgtattgacaagccccatgtcgagcgcttcctgcgcgttgtattgacggcacaggtaccagatttcacgggctttcttatgtccgacgatacgcgccaggtaacctgagccgtaaccggcatcaaagctacccactttcgggccggtttgaccgaaaatcgcgttatcggccgcaatcgttaaatcacagacgatatgaagcacatggcctccgccgatggcatagcctgataccatcgctacgaccggtttaggaatcacacggatcaaacgctgaagatcaagcacattcagacgcgggatttgatcgtctccgacatatccgccgtgaccgcggactttttggtctccgcctgaacagaatgctttatctcccgctcccgcaagaacgatgacaccaatattggagtcatcacgcgcacaagcaaacgcgtcaatcatttctgataccgtcttaggagtaaatgcgttatgtacctccgggcggttaattgttatttttgcaataccgttatacgtctcgtacaggatttcatcgtactgacgttcacttttccattctgcagccattgatatgacctccttcatttttgcctgagtccggccgaaaagctattttctttatgctttacaagccgtataaaaactcacttactatcttaccaaaaattcgcggctgttccacatgtaccgtgtgccccgcctgtttgacaacctctattttacttgatgggagcaggttatgcaccttttgattaatagcgcaaaacttttcatcccattcaccgcatatgagcaggacgggcgccttgatgcggtgtaatgcctcccaccaggaaggctgtgagcctgtccccattccgagcaggcttcctgcaagtccggacggattattcttcagcctgccggcacggatggacgcctttacgctgtccggaagagaaagctgcgtggcaaacaacggaatgctctcccaataatcaacaaacgatgttacaccttcccgcaatataaagtcagcaagcttccggtctgactgaatccgttttttgcgttcctgaagcgtgctgaggcccggggttgtactttccaaaacaagcgctgacacccgatgcggaaatgcctgtgcaaaggaatacgcaagtcttccccccatagaataaccaataagtttcactttgtgaagttttaattgatcaaaaacggcggcaaggtccgcaacctgccggctcgcactataccttgccgcttgcacaggcgcgtctgtctccccgtgacccaggcagtcaatcatcaccattcgctcgccgggaaacatgccgcgtaaaaacatccatgattctttgctgcccgtaaatccatgcagacaaacaatagcttcagacgattcgtgtccgtgtccgctatcagcagcacgatagcatacgccgtcggccgttttaactgttacagtttccattcttttttcacttcccgcactgcggcctgcagcagatcgcgatggaattgaactcttgatgtccgatctgttttcagctcgattatatgaagtccgggcttgtccgcctgcggctgatacgcatccttaaatgcttcccatgtctcaggacaagtatacgtcccgccatacagtgcggcggcatgccggaaatcaagacccgtcggcgtaccgaacagttcttcaaaatgagtcttatcagatgcctgcggcaaaaacgagaaaatcccgccgccatcattgtttattaaaataaccgtaagcggaattccaagttttttagccgctaacagcccgtttaaatcatgataaaacgataaatctccaatgacaagcgtgacaggagcttttgtaccttcacacagtcccatagccgaggagacaactccgtcaatgccgttagcgccgcggttggcatagacacggaaggaacgatcttgtttttcaaagaaagtatccacgtcgcggatcggcatgctgttgccgacaaaaatcgaactgccttcagggacaaggtgctgaagctgacgatatacatttccttcaaatgataaatcatccatgctcgcggcctgtaaatgactccggaaccggtcattgacaaattgccatttctcaagccatccggacggccgttttccggtttcagctgaacggaccgcttccaaaaacacagacggatggcaatgaatcatatgcgcgccggcctgggtgggatctctccatcctccgtcttcatcgacgataaactgctcaatggcaggatcgtctctgagccataaaaagagcggtttggaaaccggcatcggaccgaagcggatcacagcgtcagggcgcagcgcctcttttatttcttcatcttttaagaacgagtcataagcatcaataatcagcgtcttatcatgctccccgtttcggaggtttgaaagcggatcagccaaaatcgggaactgaagcatctcggcaagcgcgatgatttgctgcttttctgcttcaccgtgaatttcgccgcagacgatcatacctctttcggtacccgcgagacgctctgtaatatgacagagagagtcttgatcagctgactgaatccctgttgtgactgagacgtgcttcccctttctcattctttcaaaaggtccggctgataaatccggcatcaaaggctctctgagcggcacattgatatggactggccccatcgggcgcttcccggcttcacttacggatctgccggccaatgttctgatatagctaagcatttgaggtttttcctcaggaagagctgagtctgtgaaaaacttaacaaagttaccgaacagaaaatgctggttaatcgcctgaggcgcccccacttccctcaattcatgaggccggtcagcagtcaggacaataagaggcactcttgaataatgagcttcaatcacggccggatagaagttagccgctgccgttcctgacgtacaaatcagcatgaccggacgctggcgggcttttgcaagaccgagtgcgaaaaaacctgcggatcgttcatcaatctgtatatggacttgaatatccgggtgggccgccgccaaaaccgccaggggagttgacctcgatcccgggcaaacaaccgcgtcggtgacacccgatagcgcgaattcatcaataaagcttccgatataatgtgtaatcgggtttgtcaaagcctttcacctcctaaagcagagatcatcggctttagtttaatttgtgtttcttcatattctgattgcggatctgaatcttcaacaatgccgcagcctgcgaaaagccgcgcacttttgccttcaatcagccctgatcggatagccacgacaaattctccgttttccctgccgtccatccagccgatcggagccgcataccatccgcgtgtcatcggttcaatatcagcgataacttcaacagctttctgctgaggagctcctcccaatgccggagtgggatgcagcttttcaattaaatcaaacagcgaagcggacgttttcagattgcctgtgatcggcgtatatagatgctgaacactttttgttttatataattgcgggcctgcaggctttttcacatcactgcagctcgacaagaaagaatcgtgtatcatcttaaccacaaaatcatgttccgcgagatttttttcgtcatgcagcagctctttgccgagacggtcatcttcttgttgattttctccgcgcttaattgaacctgccagacaggtggacataacgtctttgcctgattttttgatcagccgttccggtgaagcgccgacaaagcatttatctccctgctcaatcgcaaaaacatagcttgtcgtttggtccgtcaaaagcttgcggacaacgctctccgccggaataggcccatcatatgacaaaacgacttcccttgccagcacgactttatcatattgatttgccttcatatcatttgttgctgttttaatggcttcaagccagttttccacatcaagttcttccgcttttgttaaaacaggatattcttcatactcaattgaagaaactgcaaaagcttctgaaaaagatttcagacgtttcagcgtatcttctgcctgattaccgtctgccgcccattgattgacggttaaataatcgccgtctgccgtctttgtcagcatgagtgaggggataaagaacattccttcttcaaacccgttccattcgtctcctctctcttcagcgggattaaatgaaaaaccgccgaataagacagggccgaccgcggtatgcgccgcctcttcttcttcatgaatatgaaaagccgtctttttaaagcgctcccattgttcaaaaacgtcgtgataacgttttccatttttttcattcgattggaacagcgcttctgtgccaagaccgactattgttaattcactaccgggttctgaccaaaaaaatcgtttgcctttatatttttttgctccgtctttgaaaaatgatagagggtctaaagacgcaatacgtcttgaatagctcaataagacagcatggttgacttgtttggctttatgtaatgcatgatctgcttcctctcggaacgtatgctgcaccgttgtcaccatgagacattcctccataatccgttaaatgcttttaatacaatacacctgtgatgaatttgtgtcaaacacacagatttgagcacgacaaaatgcctgcatttcttattataaacctttttgcgcaaatgaataaagaaacaaacttgaattttctttccccactctcggcaatcactgtatccttttacttcctcgtgggaaaatgactatttttatccaccatttttctgcgtaaaaacgttcatactaacagtaagcatcacatagaaacgagggattgatgtgcttacaaacgaacagatcacacacttaaaaaaagaattggaagaagccagagatgatattttaagccgctttaaagaaaatgatcaatttcagttaactgatgaattcccgtatcaatcatccggcgaattgtcttcctatgacaatcatcccggcgatcaggcgaccgaattatacgagcgggaaaaagacctggctctgctcgaccatgaaagggagcaccttcgcgatattgattactctctgaaacaaattgaaaacggcacatacggcacatgtgaagtcagcggcaaggacattccttatgacagacttgaagctctgccgacggctacgacattggcggaatattcctcgcaggatgccgtttccaaagacaggccgattgaagaggaaacaccgttcggacagtttgaatttgatgatgatgaatcaatccgggcggcttacgatagtgaagatgcttatcaggatgttgagggatacggaaactcagaaacgcctcaggatttagaagatccgccgctcagctatggggatatgacaatgaactcagaagaaaacatcggctatgctgaggattatgaaaactttatcgcgacagatattaccggaaaaaacatttccgtgtatccaagcaaggcacacgaaaaatatgagcaggaactggacgaagaaggaattatgacgacctttggcgaccttcatgctgattaaaaccccggcaggccggggtttttgaatacaaataattggtttgctgcattttcacaccgaaaactcatacacttaatggtgcatgaaccttttgaacggtttaatctttccaagaaagggaactaacgtattgacattgaatgacggagggaacaaatgaaaaagaagtatatcggtgcgattattgtatttatcattacatatgtcttgttttctttagcagggtttctctttcccatcgaccgggaatggtacgacgcgctgcaaaaacctgactggacgctgggcggatcagtgatcggcatcatatgggcggttttgtttgcgcttatttcgctctcagcagccttaatatatgcaaagttttcatgtaaagaatccaaagctttttgggtgatgcttctcatcaattatatcgtgaatcaaggattcagctattttcaattcacacagaaaaatttgcttgctgcatctatcgattgcctgcttgtggctgtgacaacactcattctgttgctcattgccggtaaatacagtaaagcttcagcctggcttctggttccttatttattatggagcgcttttgccacatacctgtcttttaccatttacgctatgaacgcataataaaaaaccttgcatactatgcaaggtttttttaatgacccgtacgggattcgaacccgtgttaccgccgtgaaagggcggtgtcttaaccgcttgaccaacgggccttatggcggagaaggagggatttgaaccctcgcgccgcttacacgacctacacccttagcaggggcgcctcttcagccacttgagtacttctccgtatggctccacaggcaggattcgaacctgcgaccgatcggttaacagccgatagctctaccactgagctactgtggaaaaatcatcatggtgggcctgagtggactcgaaccaccgacctcacgcttatcaggcgtgcgctctaaccagctgagctacaggcccatgacaatataaaaatggagcgggtgatgggaatcgaacccacgacatcagcttggaaggctgaggttttaccactaaactacacccgcatgttgtttggggcgattgatgggaatcgaacccacgagtgccagagccacaatctggtgcgttaaccacttcgccacaaccgccaaaacaatattaaattaaatggtggctcgggacggaatcgaaccgccgacacacggattttcagtccgttgctctaccaactgagctaccgagcctttttataaatggcggtccggacgggactcgaacccgcgacctcctgcgtgacaggcaggcattctaaccaactgaactaccggaccattttttggttgcgggggcaggatttgaacctgcgaccttcgggttatgagcccgacgagctaccgaactgctccaccccgcgatgataattaaattagatatggcggaggaagagggattcgaacccccgcgggctttgacacccctgtcggttttcaagaccgatcccttcagccagacttgggtattcctccgtataagtggtggaccttgtaggactcgaacctacgaccggacggttatgagccgtctgctctaaccaactgagctaaaggtccaatggtagcggcggaggggatcgaacccccgacctcacgggtatgaaccgtacgctctagccagctgagctacaccgccaaaaacaattaaaatcaagtggagcctagcgggatcgaaccgctgacctcctgcgtgcaaagcaggcgctctcccagctgagctaaggccccaaagtggtcgggaagacaggattcgaacctgcgaccccatggtcccaaaccatgtgctctaccaagctgagctacttcccgtttttcaaaagtatgtatggcgcgcccgagaggagtcgaacccctaaccttttgatccgtagtcaaacgctctatccaattgagctacgggcgcaacaataagtgccgagggccggacttgaaccggcacggtagtcacctaccgcaggattttaagtcctgtgtgtctgccaattccaccaccccggcatggatggtatagtatagttggagcggaagacgggattcgaacccgcgacccccaccttggcaaggtgatgttctaccactgaactacttccgcgtttggcaatgcggatgaagggacttgaacccccacgtctgtaaagacactagagcctgattctagcgcgtctgccaattccgccacatccgcaagaaaaacatggtgagccatgaaggactcgaaccttcgaccctctgattaaaagtcagatgctctaccaactgagctaatggctcttattacaagagacttatatagtataacatataaaagtggtgccggcaagaggacttgaacccccaacctactgattacaagtcagttgctctaccaattgagctacaccggcctaatacgccaacttatgtatgattggaatggtggaggatgacgggctcgaaccgccgaccctctgcttgtaaggcagatgctctcccagctgagctaatcctccgtatattacacttacgtgtaatggcttggcggcgtcctactctcacagggggaaacccccgactaccatcggcgctgaagagcttaacttccgtgttcggcatgggaacgggtgtgacctcttcgctatcgccaccaaaccattgagagtgttctctcaaaactagataacagtaagcatacattcaaattggttaagtcctcgatcgattagtatctgtcagctccatgtgtcgccacacttccacctcagacctatcaacctgatcatctttcagggatcttacttccttgcggaatgggaaatctcatcttgaggggggcttcatgcttagatgctttcagcacttatcccgtccgcacatagctacccagcgatgcccttggcagaacaactggtacaccagcggtgcgtccatcccggtcctctcgtactaaggacagctcctctcaaatttcctgcgcccgcgacggatagggaccgaactgtctcacgacgttctgaacccagctcgcgtaccgctttaatgggcgaacagcccaacccttgggaccgactacagccccaggatgcgatgagccgacatcgaggtgccaaacctccccgtcgatgtggactcttgggggagataagcctgttatccccggggtagcttttatccgttgagcgatggcccttccatgcggaaccaccggatcactaagcccgactttcgtccctgctcgacttgtaggtctcgcagtcaagctcccttgtgcctttacactctgcgaatgatttccaaccattctgagggaacctttgggcgcctccgttaccttttaggaggcgaccgccccagtcaaactgcccacctgacactgtctccccgcccgataagggcggcgggttagaaggtcaatacagccagggtagtatcccaccgatgcctccaccgaagctggcgctccggtttccaaggctcctacctatcctgtacaagctgtaccaacattcaatatcaggctgcagtaaagctccacggggtctttccgtcctgtcgcgggtaacctgcatcttcacaggtactataatttcaccgagtctctcgttgagacagtgcccagatcgttgcgcctttcgtgcgggtcggaacttacccgacaaggaatttcgctaccttaggaccgttatagttacggccgccgtttactggggcttcaattcgcaccttcgcttacgctaagcgctcctcttaaccttccagcaccgggcaggcgtcagcccctatacttcgccttacggcttcgcagagacctgtgtttttgctaaacagtcgcctgggcctattcactgcggctctctcgggcttgcaccctaacagagcaccccttctcccgaagttacggggtcattttgccgagttccttaacgagagttctctcgatcaccttaggattctctcctcgcctacctgtgtcggtttgcggtacgggcacctctcacctcgctagaggcttttcttggcagtgtggaatcaggaacttcgctactataattcgctcgccatcacagctcagccttcacgggaaacggatttgcctatttcccagcctaactgcttggacgcggatatccaataccgcgcttaccctatcctcctgcgtccccccattgctcaaatggtgaggaggtggtacaggaatatcaacctgttatccatcgcctacgcctttcggcctcggcttaggtcccgactaaccctgagcggacgagccttcctcaggaaaccttaggcattcggtggaggggattctcacccctctttcgctactcataccggcattctcacttctaagcgctccacaagtccttccggtcttgcttcacagcccttagaacgctctcctaccactgttcgaagaacagtccgcagcttcggtgatacgtttagccccggtacattttcggcgcagagtcactcgaccagtgagctattacgcactctttaaatggtggctgcttctaagccaacatcctggttgtctaagcaactccacatccttttccacttaacgtatactttgggaccttagctggcggtctgggctgtttccctttcgactacggatcttatcactcgcagtctgactcccaaggataagtcatcggcattcggagtttgactgaattcggtaacccggtaggggcccctagtccaatcagtgctctacctccgagactcttaccttgaggctagccctaaagctatttcggagagaaccagctatctccaggttcgattggcatttcacccctacccacacctcatccccgcacttttcaacgtgcgtgggttcgggcctccattcagtgttacctgaacttcaccctggacatgggtagatcacctggtttcgggtctacgaccacgtactcaattcgccctattcagactcgctttcgctgcggctccgcatcttctgcttaaccttgcacgggatcgtaactcgccggttcattctacaaaaggcacgccatcacccgttaacgggctctgactacttgtaggcacacggtttcaggatctctttcactccccttccggggtgcttttcacctttccctcacggtactggttcactatcggtcactagggagtatttagccttgggagatggtcctcccggattccgacggaatttcacgtgttccgccgtactcaggatccactcaggagagaacgaagttttgactacagggctgttacctcctatggcgggcctttccagacctcttcatctacctcgttcctttgtaactccgtacagagtgtcctacaaccccaagaggcaagcctcttggtttgggctggtcccgtttcgctcgccgctactcagggaatcgcatttgctttctcttcctccgggtacttagatgtttcagttccccgggtctgccttctcatatcctatgtattcagatatggataccactccattacgagtggtgggtttccccattcggaaatctccggatcaaagcttgcttacagctccccgaagcatatcggtgttcgtcccgtccttcatcggctcctagtgccaaggcatccaccgtgcgccctttctaacttaaccgttaaaaagaatcactacgtgatatcttgcattactaattgaatgtgaattacttctgttatctagttttcaaagaacaacgcataggacatgctaacacatgcgttgccacaggaagtggcgcatttagcaggtgttcctatgttttgaaggaatgatccttcaaaactaaacaagacagggaacgttctgtttataagacccaaggtcttatattccgttaaaatccttagaaaggaggtgatccagccgcaccttccgatacggctaccttgttacgacttcaccccaatcatctgtcccaccttcggcggctggctccataaaggttacctcaccgacttcgggtgttacaaactctcgtggtgtgacgggcggtgtgtacaaggcccgggaacgtattcaccgcggcatgctgatccgcgattactagcgattccagcttcacgcagtcgagttgcagactgcgatccgaactgagaacagatttgtgggattggcttaacctcgcggtttcgctgccctttgttctgtccattgtagcacgtgtgtagcccaggtcataaggggcatgatgatttgacgtcatccccaccttcctccggtttgtcaccggcagtcaccttagagtgcccaactgaatgctggcaactaagatcaagggttgcgctcgttgcgggacttaacccaacatctcacgacacgagctgacgacaaccatgcaccacctgtcactctgcccccgaaggggacgtcctatctctaggattgtcagaggatgtcaagacctggtaaggttcttcgcgttgcttcgaattaaaccacatgctccaccgcttgtgcgggcccccgtcaattcctttgagtttcagtcttgcgaccgtactccccaggcggagtgcttaatgcgttagctgcagcactaaggggcggaaaccccctaacacttagcactcatcgtttacggcgtggactaccagggtatctaatcctgttcgctccccacgctttcgctcctcagcgtcagttacagaccagagagtcgccttcgccactggtgttcctccacatctctacgcatttcaccgctacacgtggaattccactctcctcttctgcactcaagttccccagtttccaatgaccctccccggttgagccgggggctttcacatcagacttaagaaaccgcctgcgagccctttacgcccaataattccggacaacgcttgccacctacgtattaccgcggctgctggcacgtagttagccgtggctttctggttaggtaccgtcaaggtgccgccctatttgaacggcacttgttcttccctaacaacagagctttacgatccgaaaaccttcatcactcacgcggcgttgctccgtcagactttcgtccattgcggaagattccctactgctgcctcccgtaggagtctgggccgtgtctcagtcccagtgtggccgatcaccctctcaggtcggctacgcatcgtcgccttggtgagccgttacctcaccaactagctaatgcgccgcgggtccatctgtaagtggtagccgaagccaccttttatgtctgaaccatgcggttcagacaaccatccggtattagccccggtttcccggagttatcccagtcttacaggcaggttacccacgtgttactcacccgtccgccgctaacatcagggagcaagctcccatctgtccgctcgacttgcatgtattaggcacgccgccagcgttcgtcctgagccaggatcaaactctccgataaatggaacacagactaagttcactgcatcctgcagtaacgtctgtgtgatctgcatcgtgcagaccttagtttgactgactacgcacatcactgtgcgatttatttaaaactttgaattaacaggtacgttttgtcttgtttagttttcaaagatcatgaccgcttattgaagcagctttattatcttaccacccagcttcttttatgtcaataactttttttaagttgtttccgaagcttttcgttgttgtctgctgttcatcagcgacgtttaataatataacacccttttgaaaatatgacaatagttttttaaaaaaaatcattaattattttctttcatacttatttcagtttctcttctatagaaagataagctgtcttgtggtttggtatattttcttgtatagtaagattgaactaaatacttgatgaccacaaggggagcattaaagctgagagtgaacgttttgttctgaccctttgaacctgttagttaacgctggcgtagggatgtggcaaagccaaatgatttgcagtttatgtaagcagcgcgcggaccttttcccatccttccccgcgctgcttttttgtttatccttgatacggttgtctgaccagggggaaaactatgaatcattcaacacagcttgtgcgcttaattgaaatagcgattatgaccggggcggctgtcattctggacattgtctcaggcatgtttctccggatgccccaagggggttcggtctctattatgatgattccgatttttttgatttcattccgctggggagtgaaggccgggcttacgacaggctttttaacagggattgtccagatcgccatcggcaatttgtttttgcagcacccggtgcagctatttcttgattatatcgcggcatttgcagttctcggtttcagcggcttgctcgcttccggtgtacgagcatcggcattgaataaaaaaagaggcgctttaacgatgtatgttataggcggtgttttcaccggcagtgtgctgcggtatgcggcgcatgtggtctccggagcagtctttttcggaagctatgctccgaagggtacgccggtctggatttattcatccgtctataacgcgacttacatgattccttcttttatcctttcggccattgtccttatcttattattcatgactgcgccgcggcttcttgaagctaagcggacgaactgaaacagcaggcggtttacgcctgctgtttttttattccgggctgtgccgttcgttagaatcactcagttcttttgtaagttcatttatgctttgttttatgtttcctttgcctgaaaaattctcaatcagctcttttacattgattccggaagatgcttttaagctttcctggagaccggccattaaattggttgcgtagcctgtgactttattggccccgccgttttcaccgcttcctcccgtatccacgacggtaattttatcaatgtttgaaagaggcgctgagacttgttttgcgtattcaggcagcattttcacaatcatatcaaggattgcagcctgcccgtatttttcgaatgcgtcggcgattttttctttagcttccgcttctgcgagacctttcaggcggatgacttccgcttcggtttctcctctcgccttttcagcctccgctttagcaagaccgtcaattctcacgcgttccgcttccgccttggccatcgcttcgatgctgtactgctcggcatcggcttcggcgagctgcttcgcttttgcggccgcggccgcttgttccaccgagtaacggtcagcatcggcttttttcttcacttcagagtcatattggcgctcacggcgcagaatttctttttcctccaattcaatctgcttttgccgctcaataattttaatttgcatttcctgctctgtcacctgctggcgcgcttttgcggtttcaagatcatatgcctggtcggcattggcttttgctgtatcctgctctcttctgtattccgccattttcagctgattgattttttccgcttcagctatttccgtcgcccgctccagctctgatttttttgcgtctttatcagcggccgcgcgtttaatcctcgtctctttatccgcttctgccgtggcaatgtccgcatcccgcttgacttgggcgattctcggcttgcctaatgattcaagatagccgtttttatcccggacgtctttaatcgtaaaagaaacgatcatcagccccattttagcaagatcctgagacgcgacccgctggacttcctgagaaaacttttccctgtttttataaatctcttcaacggtcatggagccgaggatggagcgcagatggccttccagcacctcccgcgcctcctgctcacggtcgtccttggatttccccaaaaattgttcagctgctgtggcgatttcaccgatggagcctccgattttaataatggcggttccgtcggccattaccggcaccccttgctctgtatagacttcaggtgtagagacatcaagtttgcttgacagtaaactgagaggttctgcctgctggaataccgggagcacgaacgttcccccgccccggacgattttcagacgatttccgccttcatcaatgtggacgttcttatttcccaaataacttccggtcacgataagggcttcgtccggccccgctgtccggtacttcgtaataaatacagcaataagtgcgatgagtaaaaagaatacgattccgataacaatgataatcggcatagtcataacagttcccccttagatatcagattggttcatgcggcgtcacaaaaagcactccgtctttcacgtcaatcactaatacggccgttccgtatctgatctgttcttgatcaaagctgacggctgatttagaaatggcgccccctattccctctatgatcacttccccatagccgtctttcgggacggaagtaatgaccctgccgaccctgccctttaaatctgtctcccgatatgcgagcgattcttccgctgatgaaagcggggcaaggacgaagaagtgaagcaggctgaccaaaagaaccgaaagaacaaatgaaagcaacgcaatgacaggacttgatagcggagcggcgatttcgccgatataacctgaggctgaaaagattgttaaaaaagacagaatcaatgcagggtttaaaaatgaaacaggaatggcttctgagaggccgtgaaacacatcttgaaaaaacagaatcaaaagcgtgagacttcccgaaataatcaatgtgtaaagatagaccgtttcaaacggcagatgaaatatgtccacattctatcctcctttcggctgaggtgtcggagtgttactttatatacggatgtaaaggtaaatggtttcaattttctgataaggaaggctgattacatgattatccaatccggatatgatatgtttactctaaaggaggagataggatgagcatttttaatgaagccagacagcagacctgggaagtactgaaagggctctctgatgaggaattcaaccgaaagcccgcggctgatgagtggagcgtgcgggaagtccttgaccatttaaagaaaattgacgaaacagcgcagacccttttatcaaagcaggcaaaagacgcaccgtttaaaaaaatcgaagacaaaccgatggagtttatagaggacagatcaaataaacggccggcgccgtcacacctcgaacctgagcaaaaccgaatctcagtcattgaagcaaaacaagaattagatacggcaagacagcagctgaccgcagttatttcatcattaaacgaggaagattttgaacgtgtgcttccgcatcccgtttttcaagaactgacgatccggcagtggattgattttatcggccatcatgaaaagcgtcacatcgatcaaatagaagaaatcaaacaaaaaatcgagaaggtctgagtcagaccttctcgatttttttcttggcgcgtttcggttcataggaatggatggtgaccgcatcgcccgtgcatatatcacccgggcgttcaacaatacagacaattcctcttctgcccatcgcgtgcctcacaaacgccgcggcgagttttggctgagccggataaaaggattgaatgacttctcccggctgaatgcacggatcattttctccctcgcacaacagagacgcaccgcttggaaaaatcattctgcttccttctttaagcggcgtcagcgcagaaaaaccgctgattgcgatgttagcgccgagccattcgggaaagatatgagaaatccccatcttctccgcaatgtcatcacattcctccatggacacgattgaaatttgtctccggttaaaaatttctgttcctctttcatacatcggctcacgcgcgccggccttttttgtcagtccgaaatgcaggtcaccgggaaacccgccgtattccgcgcgaagcttgtccatctttttggtaacaaattgttcggtatccgctatatatacgccttccgtctttgctgttatgcgtttccacatcagccaccaccgcctttttcttgacattatccttaaaaaaccccgctctgtaaaggagcggggttcatttattataccgttttcggcgttaagtcaaagcagcgtttgtaaatccagttgtatgctttctcattcaaatctcttggatttccgaaagtctgcggatctttcatggcttcttttgataaacgttcaatcatgtccggagacacaccttgttcttctaaactcggcacttctaaatcttttacaagatcatacatccagttgacggacgctttggccgcttcttcggttgtcatgttgcttgtatcgattccgaatgctttggcgatgcgggcgaatttttccggatagcctttccagttgtattccattaccggtcccatcatagctgcgacgcattgtccgtgagcgacagggatgatgccgccgagcgtctggctcatcgcatgcgccgcgcctgctgattcactgccgtatgaaaggccggcaagcatcgccgcctgcgccatgccgtatcttgcttccaaatcctctccgtccgcaaacgcgcgcttaatataatgcgccgcatattcaatggccattaaagcgacggcatcagtgatcggctgcgcgaatttcatcgtatagcactcgatggcgtgcgcaagtgcgtcaatacctgtcatggccgtcacatgcggaggcatggacgtgtgcagctcagggtcaatgaccgttaaatgcgcagcgataagcggtccgcccgtattgaatttaaattctctttcctcatctgtaatgaccgcccattgtgtgacctctgaacctgttcccgcagtcgtcgggatcgttgtcagcggaggaatgcggttttccagcggctttttgccttccgcggcttcataatcaagcacgcttccttcgtgtgtcgcttctaccccgatcgctttcgccgtatccatggagcttccgccgccgacagccacaagaccgttgcagttttcttttttatacagttctgatccttcgtttacaagacgtacaggcgggttcggctccactttgttaaacaggacgacttcgatgcccgcttcctgcaaagattcaatgaccgggtttgccactcccgcgttataaattcccgggtctgttacgagcagcgcttttgtgacgccaagcgctctgacttcacttcccgcgtgctgaatcgcgccgattccgtgtttaatgactgtcgggatttcgaatgtatggaatttatgcatgctttctactttcatatttaatgtcatattgtatctcctcctaattatgcttgaaaccagttcacagccgcaggtttcgtattgcggtaaatatgtttgatttccgtgtattcttccaggccgattttgccgagttcacggccgaagcccgattgtttgtacccgccccatggcgcttgcgcgaaatacgggtggaaatcattgatccataccgttcccatccgcagtttggcggctacgcgttcgcatttttcaatatcctttgaccataccgctccggccagcccgtaaatggtatcgttggcaagtctgatcacttcttcttctgaagagaatgactcgactgttaaaacggggccgaagatttcctcttggactattcgcatatcagacttgcagtttgagaaaatagtaggttcatagaagaaaccgttttgaagggcgggatcatcaggacgtttgccgcctgtttccagttttgccccttcttcgataccgatttctacgtatttttcgactttggcccgatgctcggcggaaatcagcggaccgctttccgtatcttcatgaaaaccgtttcctaatttgatgcgtttcgtgcgcttgatcagctcggctaaaaattcatcatgaatggcttcgtccaccaaaagacgtgacccggccgaacaaacttgaccggcatggaaaaacacggcgttcagcgcttgatctgcagctgtttcgagatctgcatcttgaaatacgatattcggatttttgccgccaagctccagggcaatctttttcacgttgccgcttgccgcctgcatgatttttttgcctgtttcaattccgcccgtaaaagagaccaaatcgacgtcgaggtttctcgccagctcatcgccgacagaggcgcccggccccagcacgagattggcggcccctttcggaataccggcttcttctattaattgaaagactttaatggttgtaagcggagtaatctcgctcggctttaaaacgatcgtgtttccagccgcaagagcgggagcgattttccagctcgcctgaaggagcggatagttccacggcgtaatttgtccgcatacgccaattggctctctgacgattttacttactgaatcgggaatcggagatgaaatgacttcgcctccgtctttatccgccaaaccggcataatattgaaatacatttgcgatatcatccatatcggctttactttcttcaatcgtttttcctgtatcaagcgattccagctcagctaattcgttcagatcgcgtctgattaattccgcaattttcagaacaaattgtccgcgctcgagcccggaaagcaccggccattccccttcatcaaatgcttttctggctgcggcgatggctttcaccgcatcatcccggtctccttcgcataccgttgcaatttcttcttgattaaatggattaatgatacggcgggtctgttttttttctgcactgatccattcgccgccgatataaagcgttttgctcataagagtcctccttaccgagaagtaagtttgttaaataaaaatttaatgtttttaacaatgttaatttaacacatgtttttttgcctgtcaaaacccggtcagtccgtttagattttgacattttgtcatgattcgttaagattaagaacataaagaaatgacttaacaaatttaaacttcaagaggaaaagagggacagtatggatgagaatccagaattcgcagctatagaacaagccagggatcttgtcattgattccattgcagagacgatggatctttacggaatcacccggagtgtcgggattttatacggaacaatgtatatgagggatgaaatgacgcttgacgaaatgcgtgaggaactgcagatgagcaaaccgagtatgagcacgggcgttaaaaagctgcaggatttaaatgtggtcaaaaaaacctttcaccgcggcacacggaagcatacgtttgtagcggaaaaggatttctttacgtttttcacgaatttctttccgccgaaatgggaccgtgaagttcaggtgaatttgtccgccatcgtacaggctcaggcggatttgcagtccgttttgctggccgaggaaggcagcgcggaattacaggaagaagcgcggcagttatatgatcagcttgaaagctcgaaagcttattatcattggctgaagcggctcgccgactcggttcagagcggggagatttttaaatttattccgatagaaacggacgaaaaaaacgcctgattttgattcaggcgttttttgtcgtgatttgattatttttgagaaaatataggaacataaccccatttacttccattaaaattgatggtaaatttttataggtatggtcgttcttttttaagaacaatcagcaaattttttttagggggatttataaaaatgaaacacaagtttttctcaactgtcatggcaagtttattcggcctggttttgcttctttctctgccgacagcgtcattcgccgctgagtcaggctcaaccgttcacgagccggaaatgtccacgaaagcgactgctaccttatttgcaaaatatacaggtgccagccagcaggaatggtcattttctgatatcgaattgacgtaccgtccgaacacgatcctgagcttaggcgttatggaatttacccttcctagcggatttgcggctacaacaaaagatacagtcaacggacacgctttgcgcgaaagacagattctgaataacggcaaaacagtcagacttccgttaaacattgatttgctcggcgcagcggaatttaagctttctcttaataataaaacattgcctgctgcaggtacatataagttccgtgcagaaaataaatcattaagcatcggctctaaattctatgctgaggacacaattgttgttcaaaaacgcagcacaccgccgacacagccatgcaactgcaaataattgcgaaaaacggaccggcacaagctcatcgcttgtcagccggtctttttttgtgctgttttctttcttccggccctcgcattgacaaacccctgaaacaggagtacattcttgtttgttgtatttggagtgacgaaaacagtttcttaaggagttatgaggattgggaaaaatcaaaaataaacaatttgccgtcatcggactcggccgtttcggcggaagcatctgtaaagagctttttaaaatggggcatgaggtgcttgcgatcgatatcagcgaagagcgggtcaacgcatactcctcttatgccacgcatgccgtgcgggcaaattcaacggaagaaagcgagcttcagtcgctcggcatcagaaattttgaatatgtcatcgtagcaatcggagccaatatacaggcaagcacgctgacgacgctgttattgaaggagctgaacatccctaatatttgggtgaaagcgcaaaactattatcatcacaaagtgcttgaaaagatcggtgctgatcgtattatccatcctgaaaaggatatgggcgtgcggattgcgcaaagcctttcagatgaaaacgtcttaaattacatcgatttgtcagatgaatacagcattgtggagctttcagccactaaaaagctgcatttaaaatcccttcttgatctcggcgcacgcgccagattcggctgcaccattctcgccgtgaaacataatggagacattcagctgtccccttctccggagactgtcattcatgaatgtgactgccttgtgctgatggggcataaacgtgatattaaaaggtttgaaactgaaggaatgtaaaaaaagccggcaagctgccggctttttttgatgcttatgtttcttcacttaactggacggcggtttggtcaacccagccgaccagcttatctttcacttgaatttggtaccagacggattctccgttttgtttttcagatacgactttaatatgctggccggtaaacttttgcgccgatgccagtttaatagaatgccgctctttcgacggcttggaccacacgtcttcaatggcgtggtctttgatggcgcctttcttatcaactgctttaagagaggcattgattttgtcatattcattcaggttataggtttctatgacatctttaattttttcagcatagccggggtctgtggcgtagccggatttttgaagggcagccgccgctgttttataattgtccgcttcaatgacgggcttgtacttctttttattccaagacgttccgttgacaaataatttggcatggtcatccattgattcaaaaaacgtgctgtatttacggaattttgcccgaatcgtttttcgttttcctttttcaaattcatccgttttcatcgtgacgtgttttcctttataatcaccttttacaccgaacaggttgcgcgctttccccgcaagctcactgttcccccagtccgattcgagaatggcctgtgcgagggtgatgctcggaaggacatgatatttctcatataaaatttgagcatgcccggaaaggctgtcaataaagacctgctgctcgtccacctcttcaggcggtttttcttccgtcactatgaatttcgaaaataccattgataccagaaataatccgaatataagagatacagcaaaaaggcacccaagcacccttttggtctttgctttctttttcatatcaaccttcctttaattccggaatcactagatttataattttactggtcattgatgaaaatttcaataaaatagggaaaaagacggagaaagaacacatcgtgcaaataaaaaagactcctcaatgaggagtctttttttgttatgccatgctcagctgagggccgaacaattcaaattgaacggaatcagagtcaaacccgagtgcaagaatcatatctttcatttgcgtcataaactgtgctgatccgcacaagtaacattcagcatcttgattcagatgaagctgctccaagaaggtttgatcaatccggccgctgtaaaaaggcttgtctcctgagcggtcttgttctgccggttcactgtatacataaatgacgttaatattcggatgattctccgcagcttgttcagcctctttgcggaacgcggcgtactctccgtttttcgcggcatgaataaaagtaacggaacgctcgggctgtttttcggcggctgttttcagcatgctcatcatcggcgtgattccggaaccggcactgataagaacaaccggtttttcggaagaagacagcttgaaatccccggcgggtgcactgacttcaagtttatctccctcttgaacttcattgtggagatgagaagaaaccgctccgtcctttttcacagatatccgatatgcgccttttcgagaagcatcagacaggctgtactggcgaatgtgcgtataaggagaatccgcaatcctcactttaatgctgatatattgtcccgcttcaaatccaggaagcgaagagccgtcactcggtttgatataaaatgatgtgatatctttgctttcttttgttttctgtataaccgtaaattctttatacccctgccatccggcttcactgtacatgtctttttcaatgccgataaaagcctccgcaataacaccgtaagctttttcccatgcctgcataatttcaggagttgcggcatcctgcagcacatccttaatcgccagaagcagatactttccgacaatcggataatgttccggttttacaccgatacttgtgtgtttatggccgatctgtctgaccgccggaatgatttgttctaattgatcaatattcgccgcagccgcaataactgcatttgccaatgctgcgcgctgagtctgtttcttttggttcgtttggttaaacatatttaacagttcgggatgatcttgaaacatcaggttataaaagcgtccggtgatgttttctccatgtgtttttaatacgggtactgtgcttttgatgatgtctactgttctctcatccagcatgttcatcctcaacccttctaaagatgtatttttaatatatctttatagtaagagatatttcgaataaaagatatatctaaaatgaatctttaaaaaagtcgtcacaatattgtgttgaatttggaatttatggattttacctccttttttatcacccggtgaaacagggacacatatatttgggaatatacgtttaaagatgaaagcgggggattgcatggtttccgatatcgattacacgtctccgaatacacagttcacttatgatgtaaatgagagccgtttttttacgaaagatgctcggaactttatcaatgtattggggattaaacagttaaacacgcttgaaaatatttcattattagatatctttctgagtaaaacaaatgtgattgaaccgcatacccatcaaaacgccgctgaattggtgtactgtatttcgggttccgcggtggtgtcgatgctgaatccgttcacccagaaaatacggaattatccgatctctccaggacaagtggcgaatgttccgcaggggtggtggcattatgaagtcgccacttcagacaaaacccaccttttggccatatttgacgccccttcgcctgaagtgatatatggctcggatattctccgtctgacgccgcctgagatcatggcgcatacgtactgtctgaatgagcacgagtgggaaaaagccgtttcaccgatccggcaatcaactgtgataggtcccgataaatactgcggacagtctgaaaacacgggtattcatgatatgaataagccttatcagccaaatacgcattatccgaatgatccgtatcggcattatgttcagccgttctatagggggtattaagcggatccacatcgacagaaagagcccctcattgcagaggggctcttgatcattacgatccggttccgcagcttactttgtactcgccttcggacgatttttttgaataacatacgtgcggcgtctgtccggtttcatctttccaattgaaccaatttacataataaaggttcccgtcctctccgcctccttcttctttttgaagaatcgcaaagtagctttgatacggatatccttttttataaatgtcatgcctgatggctcctttttctgaagcagacgtgaagatgacaggagaaagagccgggagcgccgttaaaagaagtgccagtgcagctgacagagataatataagatagattttctttttcattttctctctttcctttattttgagttgttagaaatgaagcggaacacagaggctgctgcagaggatgaaaaaacaaaaaaacccttatttatagaataagggtttaaaggtatggagccaagggggctcgaacccctgacctctacgctgccagcgtagcgctctcccagctgagctatggccccgtgctgtaacgtcatgttttattatagacgactcttctatgaatttcaagcagaaaattcagtttgctcatattttcctgagacgtttttcgaacataaaaagaagaccctccgggggcctcttcgtttatcgcacgagcatgattaaaatgatgccgaggatgacacggtaaatggcgaacgggacaagcttaatccggttaatgagccgaagaaaaaacttgacgactaagagggcgacgacaaaggcgcagataaagccgacaagaaaaaacggaatcatgtcataagaaagactgctccagtatttcaccagcttcagaaggcttgcgcccgccataatcggaatcgccataataaatgtgaagtctgcggctgcccggtgattcaagcccacaataacacctccggcaatcgttgagcctgatcgggaaaatccgggccataaggcgagacactggaataatccgacacagaaagcctgtttgtaggtgattctgtccaccgtatcgatcgtttctttccttttattgatccagtccgctataagcataagcacggctccggcaattaatccgtaagcgaccgttctgacggagaataaatagcggtcaatgaaatcctcaaataaaaagccgagcaccgccgctggaacaagaccgacggcgatttgcgcgatggtcagcctgtatcccttctgctgatcgcgcgtgacgttttttttgaggccgagtaaatgtaatatccgatccttaaacacaatggccaccgccagaatcgaaccgagctgaatcaccactttgaaggaattggcggcttccggattcatcaggcttccggatttcagccagatgtcatccgctatgatcatatgtcccgtggaagaaaccggcgcgtactccgtcagcccttccacgattcccaaaacggctgctgtgaacatctcccatagtgtcatcccattcttcccttcattcatcatttacaaaagagaagctctcctttgaaggaaagcctgtcttataataaatatcatgtccgttccgattttatgacttcgatacagcatcatttttttcttcttcatataaatgcgaacgcattttgaaccaatcaaacagatgggtcgtgaccactttgatgaccgcataccccgggatggctaaaataatgccgacaaccccgaacagctttccggcggttaaaagaacaaagatgatggtaatcgggtgaatgtgaagatttttccccatgatctgcggcgaaattaatttcccttccacgagctggacaacggtccagacaatcgcaagcttcagcagcataaagggcgaagtgaccaacgcgataataatcgccggcgtgatagcaatggtcggccctaaatacggaacaacgctcgtacaagcggcaatgaccgcaagcagtgacgcataatcaagtccgataatcagatagccgataaataataaaaacccgatgcagaagctgacgatgacctgtcctctgatataggagcttaatctgtggttcatttcactcagcatcgtatacgtttgttctttcagacgggtgggcacaaactttaagatatagatcggcagttttttgccgtctttcagcaaatagaacagaataaacggcacggtcacaattgaaataatcacttcagtcagcgcgccgataaaattcccgactccggtaaatgtgctgtttgcaattgtcgccgcctgcgccgatactttattggcaagatccgaaatgttgatattcatcgtcttttgcgcctgatttacaaaatcgcttccgatcaggcttttcgtctgatcttcaacgatgtccacatatttcggcaggttgtcgatcaggctcatgatctgttcctttaaaaacggaataattgaaacgaccgtaatcgaaatcagccctataataatgaggtaaaggagcaggatggaatagactcttttcactcttattttttccaatatatctacgatcggattaagcagataataaacaattcctgtcaaaatgacggggagcgcaatcgttttgagcaggacgataatgggtgtgaaaataaatgatgtcttcataaagacaaggatattgagaccgatgagcagcaatacaagcaaaaacaagacaaatttattgtctaagaaaaactgtttaaatctgccgccccatgtttgcaatgtttccactattgttcctccatcatatgtattttacttaaattgtacactatcgttcctgtaatgaaaaataataaccggtctctatgggaatttttcctatccgtttagctggcagccttttttccatttatgtttctttgaaaaaaagctataatgtaagccaatacatagaaggagcgatagcaatgattcgatttgcaacagtcggaacgaattggattacagaacgatttctggaggcggcttctgctattgatgattttcaattaacggcggtttattccagaactgaggaacgtgcggcggaattcgccggcaaacacggcgctgctcattatttcaccagcctgaaagaaatggcggaaagcaaagcctatgacgcggtgtatctcgccagcccgaatgcatttcacaaagagcaggcggtcctttttatggaacacggcaagcatgtactatgcgaaaaaccgtttgcgtctaacgcaagggaaacggatgaaatgattcacgcagccaaaacgaacggcgttctcttgatggaagccatgaaaacgacgttcctgccgaacttcagcatgcttcaaaaccacttacataaaatcggacccgtcaggagattcacggcaagctactgccaatattcatcacgatatgatgcatataaaaacggtacggtgcttaacgcgtttaagcctgaattatcgaacggttcgttaatggacatcggcgtgtactgcatttatccggccgtcgtcctgttcggcaaaccgaaaaacgtcattgcgaccggtcataaactagcatccggcgttgacggcgaaggcacggtcattctgtcatacgacggatttgaagcggtgctgatgcattcgaaaatctcaaattcgtttgccccggcggaaattcagggtgaagaaggcacgatcgttctggacagcattcacggaccggaacgggcggaaatccgctatcgtgacggccggacggaagacatttcagtccctgatctgaaaccttcgatgtactacgaaacggctgaattcatcaatcttcttcgaaacggacagcgggagtcttccgaaaatacatttgaacgttctttcattacggcaaacattatggaagaagcgagaaaacaaatcggaatcgtctttcccgccgatcaaaactaaaaacatccgcccggattcgggcggatgttttttatttggacgctaacaggtcagcaaacgcttttgcatactgcggaaggtcgggcgggcggcggcttgatacaatgtggccgtcagttacgacagcttcatccagccactttgcccctgcatttgtcatgtcgtctttgatgccgggcgtgctcgttactttttttcctgcgagaattccggcagatataagcacccagcccgcatggcagatctggccgatcggctttttctgctcgttcatcgtacggatgatgtccaaaacttcgggatatcttcgcagtttgtcaggagcccagccgccaggcacgagcacggcatcatactcctgaataatcaggctcttaaaatcgtaatccgccgtcgcgggcacgccgtattttcctttgtatgaacggcccgcttcttctcctattaaatgaacgatcgcgccttcctctctcagccgatagacgggataccaaagctctaagtcttcaaaatcgtcactgacaagcgctataacttttttgccttctaatctcatcactgccactcccttcttttatattagtgtatcgcttttttcagatgaggaaaagaaacagctcgttacagctgttcttcgtcttcagactgaatcgtaaatttccgtgtgacctgttgcagttcttcagccatatgcgcaagcgtttcggcggatgaactgatttcttccatggaggccagctgctcttcagctgaggcggcgatgtcttgaatgccggcggacccttctttggcgactgaggtaatgtcctccaccgcgtttgtcacattttgcgacccggctgcaagctgctcaagcgttccgttcatatgctgcaaggcgcctgaaatctgagtcgtcatctctgagatttttttgaagctttcggccgtttgatccgtaatatcgaggccttccttcacatcttgattcaccgcttggaatacggaaagcgatgtggcgatttctttgacgatttcctgaatcagcgtttcgatttcctttgcggagccggctgattgtacggcaagcttcctcacttcttccgcaacgacggagaagccccgcccgtattcgcctgctcttgccgcttcaatggccgcgtttaaggcaagcagatttgtttgatcggcaatgccgttaataacgttcagaatgctcttaatgtcgtgcgacttcgtttccagcccttttacgacggcttccgcctgctgtacggaacgatcaattgttttcatctggccgaccgttttcgccactaattcttctccgcttccggccgtttcagaggtttggatggcggattcagtgatttccgccgatacattcgccgtctcggcaatgcccgcattcatttgggaaaggtgatcagcactttcttccaatttctcgctttgtgattcgtttccgtttgagaattgttcaatcgccagagtaatatgctctgtcgccttgcttgtctgtccggcggatgccgtcagctcttcggatgaagaagcgacatgttcgacggatgattggatgacgccgatgacagaccggagtgatgccgacatctcattgaagctttggctgagctgcccgaattcattttttgacttgatgtcaatgacttccgttaaatcgccgtcactgattttatctgatgtcgagacaagttttttgagcggttttgcaatcgagcgaatgataaagaagattaaaataccgccgacgataagagaaaccgccaggatgatcagcgccattttcatgacaggcgaggctgcgtcatggatctcactgacaaaaaatgtgccggcgattttccagcccgtcagtttgtttgtcgtgaaagccattttcttctgctgtccttcaaacatgtattcaaacgatccgcttgatttggaaaatacttctttcgtccactctccggagccttccgttcccgcttttatagtcggatgggcgatgtattttttatcccccgttgtaatgaaggcaaatcctttatgaccgatctggacgcgttcggaagcgttcagcaggtcgcccagattaatatcaagcgccacaacgcctgatccgtcttttgtctgctgggcaatcgtaacgaccgtctgtccggttgcagcgtctttataaggctcggtaaacaccggctgtccgcttttttcaaccgcctttgtataccactcgcgcgtgagcggattataatcggacggcatgtcagcggacggatatttcacaaacgctttgtcgcgagacgcggcgtaaattgacgcgacatcgccatttacggtgacatactgcttcatattgtcgagcagtaccgatttatttttcgtgttcagtttttcctttgtgattgattcgctgtagtagtcaatcgctttcagcttaccctcaagcatgttttccagcacgctgttcagttcactgacatttccctgggcgctgtgggtcagttcgctttctaatgtactccccgccgtttggtagctgaagtaggcgagtatgccgaccggaagcaccaatacggctaaaaatgccgcgatcagcggcttgctgatggatggctgtttgatccaatgtatcagttgtttcattttttcagtctccttctttgaaaagctaaatctaatatcgtcagataggacaaaagatttattaaaaaaactaaaaaaaacacccaaacagcacatttgggtgttctatgatctattaatctattttaaatcgtttcgtcatatcacgtaattcttccgccatttgggataacgtttccgaagacgaactgatttcttccattgaagccagctgttcttcggcagaggccgcgatatcctgaatgctggcggagctttcttttgcgatggacgcgatttgctcagaagctcctgaaatctgctgtgatcctgctgtcagctgttctaccgtcgcattcatattttgaatttctccggcgatctggttcgtcatttcagaaatccgtttgaagctcgtttcggtctgattcgtaatatccagtccgctctccacctctttgttgacggattggaacatgccgagagatgtattgatttcgttgacgatttctataattaagctttcgatttctttcgctgaatcggcagactggaccgcaagttttctgacctcttcggcgacgactgagaagccccggccgtattcacccgcacgcgcggcttcaattgccgcgttcagcgcaagaaggtttgtctgatcagcgattccgttaatgacaccgagaatgtttgtaatgtcttttgattttgtttcaagtccgcgcaccacttgttcagcttctttcactgaccggtcaatgacgttcatttggccgaccgtctggtggacgagctttccgcctgaattggcgacttccgctgatgtggcggaggattcggtaatgacggcagatgctttcgccatatctttaagcccgctgttcatttgataaatatgttccgccgcgctttcgatattttcactttggctttcatttccgttagaaaattgttcgatcgccagtgtgatatgttccgttgccttgcttgtctgctccgctgaagccgtcagctcttctgaggaagatgcgacgttattcacggaatcctgaatggcatggatgagagacctgagtgaagcggccatattgttaaagcttttgcccagctcgcctaattcatcttttgactgaatttcgatcgtttctgttaagtcgccttcactgatctgtttcgatgatgtcacaagctgcttgagcggttttgtgattgaacggataatcagcaccatgacgatggttccgatgacaatcgctaatacgagaacgagcagggacagatgaaggatcggcagggccgcttcatgaatttcgtccagatacatcgttccggtaatcttccagcctgtcagcccgttcgtatcataagccattttcttttcctggccgtcgtatttgtattgaaaatcaccttttttgctggtgaacaactgttcagcccactccccgtttaatactgtgcctgacgcacggttcgggtgggcgaccacttttttgtctttcgtcaggataaaagcgtagcctgattttccgatgttcactttctttgtcgttttcagaagctcatcgattttcatattgatggcgacgacccctgagccgtctttcgtctgctgaacgaccgtcacgaccatcgtattggtggaagccgtgcggtaaggatctgttacaacaactttccccttattttccacggcctttttataccagtctctttcaagcggattatatcctttaggcatctgcagatccggataccgtgtgaaatgtccttccgtgtcactcgtatagatggattccacgtctttattaatcttcatgtactctgtgaatttatcggtaatttgcgattggtttttcggcttgtaccgatcctttgtgagccagtcgctgaaatatgccgttccgtcttccttttggctgatgcttgtgttgatcatatcgttaatctgctgcacattatctaatgcgcttcccatcatctgcctgtcaagcgtacttaccgccgattgataggcgataaaagccagcgttgaaataggaagaatgagaatggccaaaaaagaaatgagcagttttcttgtaagcgatctctgcttgatgatttgcacaatttttttcatctgctatatctcctcttgcgtgtttacccttcatatcggcaattatgggtaaatatacacatccaaaaagaagaaatataacgaaacatactttttacctattgcaaaattagtcttttagacttaattaagagtttatcttaaaacgctttgtcagttcgcgtaattcttccgccattttttccagcgtgacggctgaggaactgatctcctccatggacgcaagctgctcttcagctgaagccgcgatgtcctgaatgccggccgcgctttgtctggagactgccgcgatatcctctgaagcgtttgatacttcctgagatccggcagaaagctgttccacggttgcattcatattttgcagttcaccggcaatctgacttgttttagcggaaatgtcccggaagcttttttccgtttcgtccgttaactgaagtccgcttttcacctcgtgattgacggattccagcattccgagcgaagtatgaatttctttgacgatttcatgaattaaggattcgatttctttcgctgaatcggcggattggacggcaagctttctcacttcttcggcaacaactgaaaaaccgcgtccgtattctcccgctcttgccgcttcaatggctgcatttaaagcaaggagattcgtttgatcggcaatgccgttaatgacgcgcaaaatgctggtgatgtcctgcgatttgagttcaagcccttgtacgacttgctccgctttacttacggattggtcaatggcgcccatctggccggctgttttcttgacaagccgctcaccggcgccggatatctccgccgattcaattgaagtttccgtcacaacggctgccgcttccgccagatcgctgagcccgtctttcatctcattcacttgtgctgtcgctttatcaatactctcactttggtcttccgttccattagaaaactgttcaatcgcaagggtgatatgttccgttgctttgctcgtctgctcagccgaagccgtcagctcctctgaggaagaagcgacatgttcaacagagtcctgaattccctgaataagcgaacggagtgaatctgtcatatgattaaaacttttaccgagcacgccgagctcatcttgagagctgacatcaatggtttcagtcagatctccgctgctgattttttccgctgaagctacgagacgttttaacggtttggtaattgagcggatgacaaaataaatgaaaatcatccctgcggcaacggctatcgccaatatgataacggccagagtcagaaccggtcttgccgcatccttgatttcatccacggacatggttccgctgatcttccagcccgtcgcttcattggtcacgtacgccatttttttcgctttcccgttcagcgtatattcatagtcgcctttttgcccgctgtataatgtatcaacccattttcccgataccgccgcgccggctttttcatcactgtaggcaacggcttttttatttttgctgaggataaaggcgtatccttcttttccgatgttcacttcttttgtcatcgtgatgagatcgtcgatttttatatcaatggcgacgacgcctgatccgtcttgcgccgcgcgggccatggtgacgaccatctttttgtttgagatggactcataagggtccgtgatgatggtttggcctttattctccatggcttcctgataccagcttctttcaagcggattgaaatcggccggcatatcggcatgcggataacgggtaaacgttccttccttgctgcttgaaaatatggcggacgctttatcattgctttcaataaactgtttaaacctttcttgcatttccgtttggtttttttctttaaatttagcgcttgtcgcccattcgctgaaatatgcagagctttttgtaaacattccgatccggtcatcaatcatattgtttaagatttgcacatttccttcggcgctttccatcatttgcttttcaacggatgaagccgccgaacggtaggcgccggcggccaatactgctaccggaataattaagatcagtaaaaatgaaatgataagttttttggctattgattttctggcgattttttttgctgtttttttcaattttgtaaacctctttcaatcatttactgtttatatcggccgactccctttttattacattgaaaattaagtcataaatgaaaaatagttctatgtactccctttgtatgcaagactttttatttaattatccggctgtcactataaaaaaggacgccttccacctggaaagcgtccttttttactagttgattttaaattgtttcgttaattcccgcagttcttcggccatttgcgccaaagtatcggcggatgtgctgatttcttccattgatgcaagctgttcttctgcggatgcggcaatatcctgaatgcttgctgcgctttcccgtgatacgtccgcaatatcggtcactgcggctgaaacgtgctgagagctgtctgacagctgttcaaccgtgccgttcattgattgcagtttttcggcgatgtcgttcgtcatgccgaagatattctggaagctttctttcgtgcgatccgttacggcaagtcctgattgcacttcttcattaacggatgtaaacatgtgaagcgaagtattaatttcagccgtgatttcctgaatgagtttttcaatctctttggcagaaccggcggattggacggcaagctttctcacttcttcggctactactgagaagccccgcccgtattcaccggctcttgccgcttcaatggctgcatttaatgcaagcaggtttgtctgatcggcaataccgttgatgactcttaaaatatgagtaatgtcttttgatttggcctcaaggccttttacaaccgcttccgcctgctggaccgattgattgatgagattcatctgcccgacggtttgctgcacatattcttccccggtgccggcagcttccttcgattgtttagatgcctccgtaatggatgatgatgtgcgggaaacggcggcgagtccgtcatttatatgattcagcttggctgagcttgaatcgactttttcgctttgctcttcgttcccgtttgaaaactgctcaatcgccattgtaatatgttccgtcgctttgcttgtctgagaagctgaagcggtcagctcttccgatgacgcggccacgttatcgacagagttttggatcgcgctgatcagtccgcgcaaagattctcccatttcattaaagctcgcgccgagttcgcccaattcatctttcgagcggatgtcaatggtttcagtcaagtctccgccgctgatttgtttagaagagcggacaagccgtttcagcggtgacgtaatggatctgacaatcaacagaattaaaattcccccgatgataatagatgctgcaaggacaatcatccccatcgtcagcaccggttgtgaggcatctttaatttcgttgagctccatgctcccctctattttccacccggtcagtttatttgtcgtaaacgccatttttttattttgatcatcgagcttgtatgaaataatgccgctgtctttgctgtatacctcattcagccacggcgttgaaactttatcgcccggtttgtggtctttatgcgcgacataggttttatttttggacgtgataaacacgaatcctttttgcccgattttgattccctgcatctgcttcagcagctggtcaatcgtaatatccatggccactacgcctgttccgtcctgcatctgctttgccacggtaatgaccatgctgccgtcgcttgccgcggtgtaagggtcggtgacaacgagcgtgccgccggccttcacagcgtctttataccaagtgcgtgttctcggatcgtaatcggccggagtattttccttcggcgcctgtgcgtagctgccgtcttccgttcctccgtaaatgcgggctacgtccttatgaatagacgtgtattgcccgaacttttcttcaagagcagacatgtttttctttgagaaggatgatccttttaacgtttcactgaaaaattcaatcgcctttgcttttgcgccgatatcatttgtaatcgttgtgttaaaagattcgatgttatttttcgcgttgcctgaaatctgatcatccagcgaattgctcgccgtatggtatgaactgaattctaacacgagaatcggtatgattaagatcacgataaatgaaatgattaatttccgtgaaatcgatgcctttgtgcaccaattaatgaattttttcatattaagctgctccctcaagtgtgataccttatatatcggctcagtcttcacattttgttaacatttcctccttttttatcacttgattttcattgcccaagcttcctgcatatcttataaaaaaagatagggggcgcgcagatgattatcatatccggccaagtgcttcggcctcaggacatcgcgaactggcagacggaagaaagccttgttccgtatataaatgaactgctcaattctcccgtacaattcgattacgggtcgattgctgaactgatgttcgaggtgcggctgcgccgccatattgtggaagccgcaagagaactgcacggatcaggtgtgaaatttgcaactttcgccaaaacatacggaaatacggcttattggagactgacgccggaaggagccctggagctgaagtacaggattcccgcttcaaaagcgattcgggatattattgaaaacggggcgttttacgcatttgaatgcgctaccgccattgttgtgatttattatctggccgtcttaaagacaatcggtgaagaacggtttaaccggcgtttccgggatatcactttgtatgactggcactatgagcatctgccgatctacacggaaaccggcagccactttttacggggagactgtttatattttaaaaatcctgattttaaccctgcaaaggctcagtggcggggagaaaatgtcattgtgatggggaatgatcaatatttcgcccacggtctcgggattctgaccgctgaacaaatcatccagagattgaattctttaagaaaaaaaaatgccgtgcagccggcttatctgcttaaccaggcaacaaggcttgatgcacccgcgctttatcagatcatgcattaaaacaatcccatcgtctgtcattgtgacgatgggatgtgaaatgcttttcttttccggtaaaaagccgtcgtgccgagcgcttggtttgcagcccattcaaacttctctaaatcatggcgggtgacggctctgtcccgtctgctccatttaatggcgcggacaaagtaataccctttaatcggcgccatggtgactttggaatgcggaaaatcttcaaagacaaactcaatagtccctctttttttataggacatttgaagaatcttcatcatccatcacctcacgatttctggattatgattcgcacaatctgtccaaaacggttttcacgtctgtcggcccctcaagtttcgcggcggactggccggcccataaagacatatgctccgcgtctcctgattgagccgcgtgcccgcgcatcggctttgtcagcgtattatgcagcggataaggcagcgtttttccctcgtcagcttcatatgttttcatgaactgattcacgattccccgcgcctgttttcctgaaaacagggtggtcagccgcgtatcggctccttttgattcggcaatggctttttgatatgccggtgaggcgctgctttcttcacaaaggagaaacggtgttcctacttgaacgccgtccgcacccaaacatcgggccgcctgcaccccgcggcggtcaaaaatgccgcctgccgcaatcaccgggatattcagcgtgtctttagcctgcggaatcagcgccataaggccgagagccggttctcctttaaccggcagaaacgacccgcgatgcccgccggcttctattccctgaaggataacggcgtccattccccgttcttcaaaagccttcgcttcctccggcgttgtcgccgtgccgaaaaggaaacaaccgcttttcttcagcttttccgccgttttttccggcggcaggccgaaggtgaatgaacacgctttgactccgtaacggatcagaagctccgctttttccgcgaaatcattccattcttctttcagatcagagaacggcttggcgtcttttgccctcggaatgcgggctttccatttttcaacaagttccgcctcaggcatctgtctttcttccgggacgaaaagatttacttgaaaggagcggtccgtcagctctttcatctcgataagctgtttttcaagcgcttgcgggctgacgtatcctgaagcgaggcttccgagcgccccttcatttgataccgccgaagccagacgcggcgtgaccagtccgccggccatcggggcctgaatgacgggctttgttaatgataacggactcatccactcactcatttgttttcctccgtttcagccagtattttgatataacatgttctgtttcgcggaccgtcaaattcgcaaaaataaacgccctgccatgttccgagtatcaggcgcccgtcttctatgatgacatgctgagaggcgccggttgtactcgctttcatatgtgccgccgtatttccctccatatgccggtccagttcgtgctcccacggatacatttcatcaaaccttctgagcatatccctcttcacatccgggtcggcattttcattgatggtaatgccggcggtggtatggggacagtatatgagcgccaaaccgtttcttacgcctgtttcgcggagaaacgattcggcttcatgtgtgatgtcgatcatttcatcccttttgtttgtttgaatctgcaattttttcagcatatgaatgcctcctttctttttctcttcctttcccatattcgtttctgtatttgtcttttcctgtcggatcgcgatgataaacacagatcacaaaaaacttcagcctcgggactgaagtttttcaccatatatatacgcgggcctcataaggctttaagaggaaggatgtcacatggcggtgcgattctgtttccacgtttgcaagcacgagagaatcggagtcaagcggataaccgggatgcctgtataaagcgggggttcgggacagattggtgatgatcagggcggtttttgttccgttttttcttagataggcataaatctgccggtcattcggaagcagcaattcatatgtgccgctgatcaatacgccgtgtttttttctgagggcgagcagccgtttgtagaaatggtatacggatgtttcatcctgcaattgtgatgcagcgttcagccatgtgtggttcggattcactccgagccacggagaagcatcagaaaacccgccgttcgcctcaccgctccattgcatcggtgtccgtgaattatcccggcccttcttccagatgatcttcatcacttgttcatgcggaacgccgcgggacgtctctttttcatacagatatttaattgcggcgtcatcataatcttcaatggatgggaacgaaacattggtcatgccgagctcctgtccctggtaaataaacggcgtgcctttcatcagcatatacatcacggcgagtgccttggcgctttctgtcaaaaaccgttcgtcaccccataccgaaacggaacggggctggtcgtgattttccataaataacgcattccagccctttccttcaaggctgtactgccagccggacaagacgcgcttaagcgccggaatggagatgctttgatcatcttccgtatcccagaggccgagatgttcaaattgaaaaatcatttgaaagacgccgttttcttcaccggcccaatcagccgcctcccaagccgccactccgttcgcctcgccgaccgtcatgatcggatagcgcgaaaatgtttcccgcttcagctcttttaagagatccattatgccttccccattcatatgatacgggaaagacgggacgtacgggagaccgtccgggttcggcatgtcagggagcccttcttttttcttaatgtgagaaatggcatccacccggaagccgtctatgcctttatcaagccaccagcgaaccatctcataaacggactgcctcatcgcttcgttttcccaatttaaatcaggctgttttttgtcaaacaggtgcaggtaatactggccggtctcttgatcatattcccacgccgatccgccgaaaatgctttcccaattattcggctctttgccgttttttccgtctctccagatgtaccagtcccgtttttcggaatctttcgctgagcgtgattcgataaaccaagggtgctcatcgcttgtatggttaatgacgaggtctataatcagcttcatgccgagcgcatggacatccgcaaggagccggtcaaaatccttcatcgtcccgaattcgccggcaatttgtttataattccgaatatcgtagccgttgtccgcgcccggcgagtcaaaaacgggacaaagccagatcacatccgcccccaactcttttatgtaatgaagctttgctctgatgccgttaatatcgccgattccgtccccgttcgaatccataaagcttcggggataaatttgatagacggccgccgttttccaccaatccgttttcataccgacactcctttctttacagcatatgaaggagcgggacgaagaagcattttttccataaaaaaagcctcattgcaaaagcaggaggctcagaaatcagtttttttaatctcaacgaagcggatatgatggtcttccgcttccagcaccttaaattcacacccttcggcatgaaacacatcaccatttttcagctccattttttgtgttaagagccagccggcaatcgtgtcaatgtcttcattttcgatggcgatatcaaggagatcattcacctcttctatgagcgccttgccgtccatcacataatggtgttcgccttttttgacgatgtggggcatttcatcctggtcatattcatcacggatttccccgacgatttcctccaatatgtcttcgacggtcacaagtcccgccgtgccgccgtattcgtcaacgagaatcgccatatgaatccgctccttctgcatgcggatcaaaagctcctgaacggggatgctttcaatgactctgatgaccggacgcatcatttcttttaattcaatggagcggccgagaaaatacgctttaaataaatccttattgttaataatgccgagaatgtgatctttgtcttccttaataaccggatatcgcgtataccgttcgttgatgatcaaatgtatggcttcatcaactgactgttcaagcgagatgacggcgatttcggtgcgcggcaccatgatttctctggcgacccggttatcgaattcaaatattttattgacgtaacggaattcagattgattgatttgaccttttttatagctttcggacaaaatcagccgcaattcttcttcactgaccacgacctcatgttctttcaccgaatgaaaaccgaacagcttgaccaaaaatccggctgagccgtttaacagcttaataaacggatacatcactttataaaacagaatgagcggtttcgccgtccacagactgacagcttcggctttttgaatggatatcgttttcggcgcaagctctccgatgacgacgtgcagatacgtgacggcgataaacgccgcaataaacgtgacgacgtgcgtaatagatgacggcattccgatcaggctgaaaacaggatgaagaagccgctgaatcgtcggttcaccgagccagccgagtccgagcgccgtaatcgtaatgccgagctggcacgctgataaatattcatcgagatttgaaatcaccctgtgcgccgcgagcgcccggctgtctccggtttcaaccagctccgcgatttttgaaccgcggattttgacaatcgcaaattccgcagcgacaaagatggccgttaatccgattaacagcataatgagaatcagttttaatataagcaaaaaaacccctaccgcaaacggtaaggggccacctccttcgtgttaattctcatcacgaccatttaagaaaatcatcacaaaacgaagcagctcgaataatgaaacgagcgccgcagccacatacgtcagcgcggcggcgttcagcactttattcacgccgtgttcttcactgttgcgaatgaatccttccgacacgataatccgcttcgccctcgcgctggcattaaactcgacaggcagtgtgacaagctggaaaaaaacagcggccgaaaacaaaataatgccgagtccgattaagttcaagctgcccaggagcatcccgcccaagaaaagcagaggggcgaccccggaggcaaaattgacgaccggaaaaattttgtgcctcagcacaagcgcgccgtatgattcctgatgctgcaaagcatgtccgacttcatgggaagcgacggaaatggcggaaatggagcggccgtaatataccggctcagataaacgcaccacccgctccgtcgggtcgtaatggtctgttaaagtgcctcttaccggttctaccggcacatcatataaaccgttaatatcaagaatccgtcttgccgtttccgcccccgtccgctgactggaggcttccacgtctgagtatttctgaaaattgcttttcactttaaattgtgcccaaaacgacaaacccaatgcagcaattgttaaaaagataaacagcatattatcctcttcctttttctcttatatcgtacgatctgcttatatattattttaatgattgcccgctttcctgtacagaaatccgcttcttttttctgacaggaatcaatcctccgagcatgatgaggatacacccggccattccgatgtaaaacggaaacgtgcctgcggtctcttttgcaaaaacaagccatgaaaatccgccggacatgtgattgtatccattcaaatcgaaaataagcaatacggccgccgaagcaagcagctgcgctccggccagcgccgccaacagtttttgaatgaccgtcatttgactcaccctttttcggtccgctttctttatcatatgaaaaaataagggtgaatatgttttcggcgatttttgaaagacatcaaacgaactgggacatactgtataaaaaaagatacaggtgtgatcgacatgaaagtgacaaatggcgagaaagaacagctgagcaatgcgatagacagaatgaacgaagggcttgacgccttcatccagctctataatgaatcagaaaacgacgaacctctcattcagtttgaagatgagacggccgatttaatcagacatgcgcgtgactcatacggccaggaacagctggacgaaaaactaaacaccattattaagcagattttatccatctctctgtcgaaagaagagccggacgaatgaaatcaaaccgtatttttatttcctggctgagatggccgttatatgttcggatcgggctgatcattatcgccttgattttattgttcggccaactcatttacatgctcgaaccgaagcaattcacgtctgtgtttgaaggggtttggtgggcggtcattacggtggccacagtcggctacggcgattacgttccgcagacgccgctcgggcagattgccggcatggtgcttgtattaagcggagcgagttttgtgaccgcctatttcgccacgctttcttcagccgtgttcagcaaacagcaccgctatgtcgaagggaaggtcgcctttaaaggcaaggggcacgtcattcttatcggatggaacgaaaaatcgcatatgctgctgaaagagctgcagcacatcgcaccgtcaaaaactgtcgtcctgattgatgattcattaagggaaggtccgcttattgaaaacgtccatttcatccgcggacatgccgctgatgacagcacgctcaataaggcgaatattacggaagctgataccgtcattctgacagcggaccagcagaaaaatgaatccgaagctgatatgctgtcggtattaacgcttctcgccatcaaagggctgcatccgtctgtttattgtatcgtagaaattttaacggaacggtatgtcaaaaacgccgagcgcgcaggagccaataagattctgtgcacatcacacctgtcgagccgggtgatgtttgagcattaccgggtcaagctgcagcttgccaaaccgcaaacgctgtcagatctgacgctggagaaaaaggtgcgcatcattcccgtccccgaggaactaaagggctcatcttatcatgactgcgcgctctattatctcagacggaataccacgatcatcggcatacaaaaagaagaggggccgatgctgacccctcccctgtcataccaggtgctcgatactgatctgtttttggctctttaatgcagcaggacgtcttccagctctttcacaagcgagatgccgatatctgtatatgagcggtcaattgccgcatcccgccgtttcggttcggagaattggttgaataatgactcaaaaacaccgccgcctgctgcatcatccgtttcctgctgataaacgtgcctcagcaaaaagggtgtgccgattgtaacggcggccccccgttcatccaggtgtcccttatttgcttcaacagggatacggagaaataaatagccgtcctgatcggaaattttgtaatcaaagaacccgcggtcatactcccagccgcctccgatggtataaccgatcggtttcatcacctgttccagttcgcggagtaaaaacgattgaccttcaagtgaagatggtatgctgatcatgtgcatatgctcctttttgtctttagcgtccccgctctgcggtatcttcatacggcgtccgggaagaaccgggagcggcagacagacgctgaaaagaggtgacggcgcattcaatcagaacatacgtcacaattgcggagagagcggcttccgttgaaatatagaaaacggcggcatagagacagcacttcgtgatcagcgtatgcatccggccaatcttcagtttcagccggaccatgtccgtaaacaagccgagagggaaagcgaaaaacaggatggtttgcaagagggattcgggagacagttttagtgccgaatagacgatagcggcggaacagacggaaatgaagacatgcttacataaaagccgcatcaattcatcatcacacctttcacggtttaaaaaaggctgacccgtcatgctgagggccagcccttctttttatttttcaaggcgtttttcaagctctgcttttttctcttcaaagcccggtttgccgagaagcgcgaacatattcaccttataggcttcaacacccggctgatcaaacgggttgactccgagcagataaccgctcatcgccaccgctttttcaaagaaataaacgagatatccaaatgtatatgcgttaagctccggaatattgacaattaagttaggcacttttccgtctgtatgggcaagcatcgtgccttcgaacgcttttttgttgacgaaatcgaccgttttgccggctaaataatttaagccgtcgagatcattttccgcttcttcaattgtcagctcatgcttcggtttttcaacgtttaatacggtttcaaacagatcacgtctgccttcctgcacgtattgaccgagagagtgaaggtctgttgagaagttagcggaagaaggatagatgcctttttcgtcttttccttcactttcgccgaagagctgcttccaccattcagcaaagtattgcagcgcaggctcatagttgatgagcatttcaatggttctgcctttattatacagaacgttgcggacgacggcgtattggtaagccgcgttctcttctaattccgagctggaaaagtctttgcttgcatcaagagcgcctttcatcatttcatcgatatcagccccgcttaccgcaatcggcagaaggcctaccgcagtcagaacggagaaacgtccgccgacatcatcaggaataacgaatgattcgaagccttcttcattagaaagcgtttttaaagcgccgcgttctttatctgttgtcgcgtaaatccgcgctttcgcttcttcttttccgtatttttcttcaagaagtttgcggaaaatccggaaagcgattgcaggttccgtcgtcgtgcctgacttagaaatgacattgatagagaaatcagcgtcttccaaaagatccataacatctttcatataagttgagctgatattattgccgataaagataacttgagggtttttgcgcttatctttcggcagaacattatagaaagaatgattgagcgcttcaatcgccgcgcgggcgcctaagtatgaaccgccgatacccacgacgagaagcacgtcagaatctgatttgattttttcagcgctttttttaatgcgcgcgaattcttctttatcatagttttcagggaggtccacccagcctaaaaagtcgcttccggcgcctgttttttcatggatattatggtgtgccgtttttacgaaatcacgtgcgtatgtaagttcatgttcattgaaaaaaggtaacgctcttgagtaatcaaagcgtacatgcgtcatttgcttgtccctccatcacggtgaattgttttctctttcactttatatgaactcacccgctaaatcaagtcatgaagaaggcatgatgaatacgggatttgcgctgaagatgcgctcattttttatacaatatcccggattcgaaatagttatatttgtaataatcgtgaaagaggtaacgaatcgaatgttggtgatccaggaacgtatcacctttactttggagcaggttgacatccatcgccaataccgatgggacggttctttttatatagtactcctcttgagaggctgctaagcaggcatattaaggtataaatgtccatttttaaaaatagtgtctatatttgggttatcatgttaagatgaaaataattttaaaccgggaggtgattctttgactaaaaccattggtcttatttgtggaagtttacgaaaaaactcgtataatcgagtgattgctcaatcattgattgacttcgataatgcggctcaatttcgctgggttgaaatagacactcttcctttttttaacgaagatttagaaatggccggagcaccagactccgtaacatcctttagagctgatatacgagacgttgacggcgtcatcattgtaagtccagagtacaattccggaatcccggggtattaaaaaatgcattggactgggcatcgtgaccgcggacctcttccgttttaaacagaaaaccggttggcttaatcggcgcaacccccggagggttcggcacctcttttggtcaaatgcaaacgagagaagtactcgaagctatgcaagtcaatgttctgccctttcaaaaaatgctgatttcgcaagtccatgagaaaattgattccgctcaacacatacttacggatgaacaaacaaaacgttatcttcaacgctatttacaacagttcatccattggattgatcatgctccggttcccattccggattaattgaaagatcatcaccttcacgaaaagtcacttcagaaataactttctacctatacagtatatgaatagatttaccgttttccattgacaaactgacttgccttaattcaaggaggatgataaaatgtctgatctttattcccgtctttcaaaagatgattctgccgtgcttttagttgaccatcaaaccggccttatttccggtctcgtgcgtgactatggcgttgatgaatttaaaaacaatgtattggctctcggtgatacggctaaattctttgatttaccggttattttaacaaccagctttgaaaatggacccaacggaccgctcatgcaagaactcgttgatctctttcctgatgcgccaaaaatagcccgtcccggacaaattaatgcatgggacaatgaagactttgttaaagccattgaagcgaccggcaaaaaacagctgattatcgcgggggtggtaacagacgtctgcgttgcttttcctgcgctttctgccattaaagcaggctacgaagtgtttgttgtgacagatgcttcggggacgtttaataagcaagtagcagatgcatcattaacccgtatggctcatggcggcgtgcagcttatgaactggttcagcacagcatgcgagcttcagcgtgattggcgcaacgatgttgaaggttttggcgcattagtctccagtcatcttcccggttatcaaaacttaatgggaagctatatgggggcgcagcgggaccttagtacacaaaatgcataaaaaggagcgctgattgaatcagcgccccttttttaaattcgcggctcttcatcttcgtgatttagatttcgtgtaaatagatgacagacaatcgcaaagttaattggtcctttacggatgaaacgatttccatagttgtctcatggaaaagggtgtttcacttgctcctaatgaactaatagaaaatccggaaagagggactcccaaaacggttacatctgcagcttgaaaatcactccggccgggaatgtatcttacagtgacgcctttaagatggcaagtacatcatctttgttcagtttttggaaattgccgaatccgccgtattccatttcttttgcggcgatgtctgcgatcagctcaagcttgtcttcgccgatgtcataatccgcaaggcgggacggtgcgccgaggcttgtccagaacgcggacaatttatcgatcccttcaagcgcaatttctttatccgttttgccttcagtatcaatgtcaaacatattaagcatgaggtttttaaaacggtccacatttgtatcaagcgtgtatctcatccagttcgggaacagaatcgcaagtcctcccgcgtgagggatgtcataaaccgctgatacggcgtgctccatcgtatgggaagcccaatcgccgaaatagcccatttgcagcgtgccgtttaatgcgatcgtacccgcgtataaaatcgtttcgcggtgcttatagttctcaaggtcttccaaaagtttcggcgctgtttcaattaccgtctgaaggaccgcaaaacacattctgtcctgaagcggcgtgttttcaacattgtggaagtattgttcaaatacgtggctcatcatatccaccatgccgtatacggtttggttttccggaacgctgaaagtattctcgggatctaaaatggagaaacgcggatgagtgacattgctgccccatacgaatttttcgtttgtttcccaatttgtgataacggaatcagggttcatttcagagcctgtcgccgcaagcgtcagcaccgtgccgaacgggagcgcgtcctgcgccgttacttttttgctgtaaatgtcccatgcgtcgccgtcatatttcgcaccggccgcaatcgcttttgtacagtcgatgacacttccgccgccgactgcgagaaggaaatcaatctcatgctgtctgcacagctcaattcctttatttaccgtttccagacgcgggttcggttcaacgcccgcaagttcatgaacggctgcgccttcttcttttaaaatgcctgttacttggtcatacaggccgtttcgcttaatgctgccgcctccgtaaacaagcagcacgtttttcccgtattgcttcagctcttttttcaattggtcgatttgaccttttccgaaaatcagtttcgtcggattgcagtacgtaaagttctccatttatcatgacctccaaaaaaatcgtaagggaattactataacacagaaaaaaaggagctgccaatccggccgcccccctttatgttattacaatgatgctttcagtatcgcaagcacatcttctttctgcagtgacttgaactgtccgaatgctccgtttgccatcgctttatctgcaatcgtatccagcttctcatcagaaatatcgtaatcagcgagtctgttcggagcgccgaggctcgtccagaattcagacagcctgctgattccttcaagtgcgatctcttcatctgatttgcctgtctcgtcaatatcgaaaacacggacggcaagctgtttaaagcgggccggattttctttgagcacatgtctcatccagttcgggaacagaatcgctaaacctccggcgtgcggtatatcgtataccgctgataccgcatgctcgatgttgtgtgtggcccaatcccctcttgcgcccattgacagcattccgtttaatgcgatcgtgcctgtatataaaatcgtctcacgaagctcatagttctccagatcgttgatcagcttcggcgctgtttcaatcaccgtgcgcagaagcgattcacacatccggtcctgatacggcgtgtttgacgtgtggtggaaatattgttcaaacacatggctcatcatatcgaccatgccgtaaatggtgtggtctttcggaacggtaaatgtgtttaccggatcgagaatagagaatttagggtaaacgagcgggctcccccatccgtatttctcttgtgtctcccagtttgtgatgactgatccggagttcatctctgaaccggtcgccgcaagtgtcagcactgttccgaacggcagcgcttctttcggctggtgttttttcgtgacgatatcccacgcgtcgccgtcatatttagcgcccgccgcgatggctttcgtgcagtcaatgacacttccgccgccgacggccaataagaaatcgatgctgttttctttacagatcgcaacacctttgttcaccgttgagacacgcggattcggctctacgcctgccaattcatgtacggtaactcctgcttttttcagcaggtcggttacttgatcataaagaccgctgcgcttaatgctgccgcctccgtatacgagcagtacgttctttccgtacggcttgatttcttcaggaagtttttcgacctctccctttccgaaaatcaatttggtcggattccaatatgtaaagttttgcatgacatctcctcctttggatttatattatgcagaaagttgacgttcaatgtaaagcaatccgcttttttgacggcacatcacacggtttacagacagcggtttcccgggaaaggcacttgtacagcttgagacagtgtgtgatttacacggcggagaatgtagtatgcatagattctttgctttgtcacaatctataactgtttcacgaatttatagaggaggttgtttacatgagtgttattcagcgtatctgtctcgtattaacgattatcggcgctattaactggggactgatcggatttttccaatttgatttagtagcagccatcttcggcggccaaggatcagctctgtcgcggattatttacggtcttgtcggcatcgccggtctgatcaatctcggcctgctgtttaagccgaacgaagaaacatcccgcgaggaagcggcaaatccggaagtcagataaacataaaaaaagcaccgaacatacatatccggtgctttttttgatggttattttttgataaggtctttgcggttggactgttcaatccactcttcaagcttatctttcaatgtgttgaaaccttgcggagcagatgtttcttcagaaacttgtgccgctttcggttttcttggtttgctttcttttctttcaggcgccgcttgagtcgcacggatagaaaggctgattttgcctttttcttcgtcaactgcaagtacttttacttgtacttcgtcaccgatagaaaggtgttcattaatgtcttttacgaaaccgtgagtgacttcagaaatgtgaacaagtccttgagtttcttcatctaatgcaacaaacgcaccatacgcttgtaatcctgttactttaccagtgtaaacactgcccacttcaaattttgctgccattcataacaactcctaagttaaattaaatacagattatacgcaatttaaaattatatcatacaagtttgtttttcgcaaagagaacttttttacatcatcatgtttaagcgcagataaagggggtatactatgattacgaaggctttctagtattccccccttttatttggatgcgaaccgggttcgtatctttttttatgcccttttttcaacaaaccgtttgattctgacgagcgcttcctgaatctgctcaatggatgtcgcataggaacatctgatgtagccttcgccgctcgggccgaatacattccccggaacgacggctactttttcttcaatgagcagctgttccgcgaattcttctgaactcatgccggtcgactgaatggaaggaaaggcgtaaaacgctccgccggggtggtggcagccgagtccgatttcgttcaatgtttccacaatcaggtttcggcgtctccggtagctttttttcattctttcgacgtcttcctgaccgtttttcagcccttcaagcgccgcgtactgagccatggaaggcgcgcacatcatcgcgtgctgatgaattttgagcatggcatccctgatcacgggaggcgccgccgtaaacccgagtctccaccccgtcatggcaaacgctttggagaaacctgaaatcaaaatcgtgcgttccttcatgccgcggatggctcccatgctcgtgaatggctcatcatacgtcagctcggcataaatttcatcggcaagcacgatcaagtcatgtttttcagcgaaggaagcgatggattcaagctcttctttcgaatagacggaaccagtcggatttgacggcgagcatagaagcagcgcttttgttttgtccgtcagggccgcttcaaaatcggctgctgatgctttgaaaccttttgcagctacagtctgaatcggcaccggcttcgcccccgtcagggtcacgagtgattcatatgcgacaaaacacggttcgggaattaacatttcctctccgggattcataatggcgcggacagcgagatcaagcgcctggcttgcccctaccgtaacaatcagttcactgtcaggcgaataactcaggccgaaccgctgatctaaatagcggctgatttcttctctcagttcataaagacccgcatttgccgtataagccgtataaccctgttctaaagaaagaatactcgcttccctcacgttccaggccgtcacaaagtcaggctctcccactcccagtgaaatgacgccttccatcgtagcagccagatcaaagaatttgcggatgcctgacggtttaatctgctgcacgtagtcagataaataagaagtcttcgtttccatttacggagacaccacgattcttttgtcatcgtctccgctttcaaagactttgccgtcatgcttatattttttcaggataaagtgcgtcgtcgtggaaacgacggactcaagggtggacaatttttcagacacgaagcttgccacgtctgacatcgtgttgccgcgaataacgacagataagtcatacacccctgacatcaggtacactgattcaacttcctggaatctgtatatccgttcagcgacttcatcaaagccgacatttcgtttcggagtgacttttacgtcaatcatcgccgtgacgccttccaaaccgtcgactttgcgccagtcgatcatcgccgcataatcaatgatgactttttccttttcaagcttttcaatgatgcttttgacttcttcggcgggaatgttcgccattttcgcgatcgtttccgcatcaacgcggctgttttcgtctaaaatttctaatatttctgtttctttttccgtcagcttcatacgtttcacacctttgcattatcaaaaatcttcatgacattatatcacgattttcgacaaatgctaagaaaaacccgaaagaaaccagaactaaaatctgacaatcaaaaaagcctttacattacaacaaagaaaggacggcgaaggctctcatggaagctgtttcaccgattaaacgggccgcgatagacggagttgaactgtattacgagcattatgaaaatcccggcagacagacactcgtctgcgtacacggttttttatcttcggcattcagcttcagaaaactgatcccgctgctcagaaaccattatgatattatcgccgttgacctgcctcctttcgggcaatcggaaaagtcacggactttcgtatatacttacgcaaacctcgccaagcttctgatcggacttctggaaaagctcggtatcagccgggccgcactcatcggccattcgatgggcggccagatttccttatccgcgtctcttctcagacccgagcttttttctaaaatcgtcctgctgtgcagctcggggtatttaaagcgctcgcacccgtcgattatattcgggacgcacctcccttgttttgacctgtatcttaagtattggctttcaaaagacggtgtgctgaaaaacctgttaaatgtcgttcacgaccggacgcttatcgatcaggaaatgattgacggttacgaaaaaccatttacagaccgccagattttcaaagcgatgacaaggttcatcagacacagggagggcgatttagagcccgaggatttgaagaaagtgcaaaaccccgctcttttaatatggggagaagaagaccgggtcgttccggtctcagtcggaaaacggcttcatgacgacctgccggattccattctgtattcactcaaggatacgggacacctcgtacccgaagagcgcccggagtttgtttcggaacggatttttgaatttattcaataaaaaaaaccggcggaaccgccggtttttaaggggtgcaggagctgctttcttttatgaacagaagctgctcggcggccttttggcagccttcgatcggtagcttttgctcaaatgaagcttcaaagatatcctgaatggctgctgccagcttgtcggcacggtcttcactgtagacggcctgaacgatgtcgacggcttctgtctcataaaaatcttctccatatttaaatgggtcccacttggcaatgattttcatcatttccatgaccgcttggctttcttccattttcatcaccgcttataataaagtttgcaaatctattttatcatagatacgctgtgcaaaataatgatactacaggagtgacatacatgaactttgatcttcgagaaaaccgtcttggcacacaatcggtgaaatgggacaaggcggaagcgttattcggcgtatcggatgcacttccgatgtgggttgccgatatggatttccgcgctcccgaagcggtcactgacgccttaaaagcccgccttgaccacggcatattcggttatacgtctcctgacgaaaacacaagagaagccgtcgcttcatggcttgagacacggcacggctaccggcccgatcccgcaagcatcacgttcagtcccggggttgtcacggcaatcagcatggcagtacaagcctttaccgaaccgggcgatccggtgttgattcaatcaccggtgtatacgcctttttatcagatgatcaaggaaaacaaacggcaggttttacataacccattacgggaagagaacggcgtctactgcatggattttgaggatcttgagaaaaagctgagcgattctgaggtcaagctgatgattctttgtaatccccacaatccgtccggcagagcgtggagccgggatgagcttatgcagctcggatcgctgtgcgccgctcataacgtcaccgtcgtttctgacgagatacattccgacttgatgctgtacggaaagccgcatacgccttttgcttctctgtctgaggagtttgcgcggatttccattacttgtgtcgcgccgagcaagacgtttaatattgccggcattcaggcatccgccattatcattcccgaccgttataagcgggcgaaattctccgccgcattgcatcagaacgggatttccagcctcaacacatttgcggttgcagcaatcgaagcggcttatacaaagggaggcccttggcttgacgcactgattccttacattgaaaggaatatgaaattggctgaggactttttaagaaaagaattgccgaaagtccgcatgatgaaacctgacgcttcctatttgatctggatggatttcagcggatacggattttcggatgccgagctcaaagaaagaatgctcaaaaaagggaaaatcatattagagccgggaacgaaatacggaccgggcggcgaaggatttatgagacttaatgtcggctgttcagccgccgccgtaaaagaagggcttaagagaatgaaagcagcgctctcttagcagcggaaagaacgcctttatcagatgagataagggcgttcgctttagagaaataaatactttttttgccggtaaagatgttataatagattcatatttacataggaaaggatttcgcataaatggagattgtaaaggattacctgcttcacttctcttttattttattccctatttttctctatcaagtcttctggctcagcaagcccgatttgcttgtgccgagagcgaaccgcctgctggtcgccgtatttgcagcgtcatcttccttattatgtacggcttttcccatccaggagcttcattccgtccgttacggtttgcagctgattcccattatcgtctgcctgctttattccggtaccgcagcaggacttgccgcaggggcagcatccgttttttttcagctcatatggtttgaaccttccgctctttttttcttatccttaattccttttttaatcatcatccctatccagctccaaacgaaatggccttttttctcaaagcggaagaaactgcttttcgctcttctcatcggctgcactgaaaccgccttattaaccgcatctgtcttcatctattccgcgaccaatattttcaattttcaaaatctatcttccgtttattatgaggcggcagtatccgttttttttcaagtcagcgcccttttgctgtgcatttatttgattgagatcattgatgagaatgcgtccatgcgggcaaggctgattcactcagaaaaaatggccgtcgtcagcgagcttgcggcaagcgtcgcccatgaagtccgcaatccgcttacggtcgtcagaggttttgtgcagctgctgttcagcggcgagcagcttcaggacaaatcccactccggatatcagaaacttgtgctgtccgaactcgaccgggctcagacgatcattacgaattatctcgatatggcgaagcaggatgactatgaaaaagaaaagtttgatatttctctgcttgtaaaggaaacaggttccttaatggagtcttatgctaattttaaatcggtgaccgtgactgttcaaagcgagcctgatttatatgtgttcggcgatgtaaaaaaactgaaacaggccttcattaatctgattaaaaacagtattgaagccgtgccctctgaaaacggccgaatcgaggtctccgtccaaaaacaggaagagatgattctcattcagattacggataacggaatcggcatgtccgatgaagaactgcagaaactcggcaaaccgtattatacgctgaaaacgaatggcaccgggctcgggcttaccgtgacattctcgattattcagcatcatgaaggctccgtctatttcaccagcggcgagcactcgggcacaacggcttcagtcaggcttccggcagctgttcactagccaatcgcgttgatcttttatagaataactagagagaggtgaacgctatgaattcgtttgaaatcggcacaatcgtaaaagggttttataaaacaggagcatacataggggaagtgacagacgtcaggcccaatcactatttagtgaaaattaaagccgttctgacgcatcccgctcaaggagatcttcatcatccgaagcaggcggatgttccgttctttcatgaaagaagagcgcttgcattcggggaacagacaaacataccgcatcagatggtcaaaccgtttgatggcgaagttcctgattatacggcttccttacaagcggcgtctgcccggctgaaagatcagcttacagcggacggctcagaatgggcggaacgttcgctcgccaacttggccgcgttagagcgtgactattttaaaagaacttgacccagtcggcatgattgggtttttttatgtggcccgtcgaaacagttcagtcagatcgacgcgatcaccgatcgtcgggggtttcggtttttcaagatattgtttatcccgctcgacaagcttgaataatttgtatgtcgtccgcgcatcatccagcgctttatgatgcgtgcccgtccctttatcgccatactcttccgccgctttccaaaggccggtcaatgttctgtcgccaaagaagtttttatattctagggacagatcccgaagttctcctttgaacggaaaagggatgtggttaaacatgcaattttgctttaacactttcatatccatattgccccaggtgacgatcgtgcagtttttatcaggatcaagctcatttaatttgcggatgaattcattaaacgtgattccgccgtccacgtctttttgggtgatgttcagaaaggttttgcatcgtttcgtcagctttggaaattttttcggtttgatataactcgaaaacgtttcagtcacttcatcattcaccgtcttgacaatccccgcttcaataatctcgggaaagaaattttgcgggctgtattttccgtcaggcatcgtaaattcaaaatcaataatgagcagactgcgctgatccacttttttacacctgcctttcctccgatcaaaaatgatattttatgatagtatatcagtttcccctctgaaactttcttcattttctaaaaataatgaattttcctatatccgcatcgaaaatacaaataccggattcattcctatatactaatgattagacacacgaaaattaaagaaggtgatgttatttctgtccgtaagaagaacttcgtcgtcatttggattacaaatttctttatttccgccagcatgaccatgattgttccgtttctttcgttatatatcgaaacgatcagcccccattcgggcgggtatgtgcagagatggagcgggtatgtgttcggcgtcacgtttttaatggcgtttgtgatttccccgttttggggcagattcggcgataagcgcggctacaaaaaaattctcttgatcacaggcaccggcattgccgtcagcattttattgatggggtttgtgacatccgtttatcagctgtttgtcctccggctgcttatgggccttgtaacgggctttgttccgacttcgcttgccatgatttcggcgcagacgccgaaagagactgccgggaaaacgctcggcacgctgcagatgggtcaggtgtcaggcactttattcggaccgatgctgggcgggctgctcgctgacagcttcggatttacgtacacattttttattacgtcttttgtcattttcgcatctgtgcttctcgttttatttcaggtgaatgagcagccgctcggcgagaaacaaaacaagcggaaaacctattccagaaaacaggtgctctcctatatttttcaccagcccgcgctttgggcgatgatggtgcttaccatgatcgtgcagaccggcaatttcagcatccagccgctgctcgctttatatgtcaatgagctgcacggacctgttaatttagcctttttctccggaatggcgttttcagcgaccggactcggaagcttattgcttgcccggaaatggggggacttcggcgaccgcttcggccacagccggatcttaatcgtgcttttgattgcatcagcggtgttttttattccgcaggcgctcgcctcctccctctccattctgttagtcttcagatttctgttcggcatggtcatgggcggcacgctcccctgcattacggccgcgatccgcgtcagggctccgggcagcatccagggagaggtgctcggatataacgtcagctttcgttttctcggaaacgtgctcggccctctgctcggaggtgcggtctcaagcggtttttctatttcggctgctttctacgtcaccgcctttctcttttttataggcgcggggcttttatggatggcgggacatctgcaaaaggatacagcgtcaaatgcgggctgaccggcagcgatcacgatttcttctaaatttaaccttctcgtattcttaaaagaatgatacgatatggctagaaatcaggagaaaagagagtgaccatggtacgtaaaataatcggatggattttgctgctcggcattatcccgttgtgtgcatttacagttattgcttccggcaaagaggtaaaacaaatcaagccttttgatcaggtgctcgataaacatattgatttaaaagcgatcaacctggttcaaaacagttacatgtatgacagggacggaagccttgtttctgagattgtcagcgatcatgagaaccgcgtgatcgtgccctttaataaaataccgaatgaggtaaaacagctgtttttaacctctgaagaccgccatttttatgagcataaagggtttgactttatggggatggtcagggcggccgcctccaatttcaaagatcataaaattgaccagggcgccagcaccatcacccagcagctggcaaggaatgtgtatttaagccatgaacgcaccttcagccgaaaactgacggagctggcctattcctatcagcttgagaaaaaatacagcaaagatgagattttagaaggctacttaaatacgatttattttaataacggtgtatacggtgtcggttcggcggcacaattttatttcagcaagccgctgaaatctctcactttgggagagatggcctttatctgcgccatccctaataaccctacattatatgatcctctcaagcattttgattatacgaaaaaacgacaagtcagattgcttaacggattgaaaaaagcaggcgttatatccgggaaacagctgaaaaaagccgaaaaggaaaagatcaagcttgatataaacgaaaaaacaaataaatatcctgactatgtttcctatgtaaatgatgaattcacacagcttgtttcctcatccgaaggctatgacaaacgtcttgaaaaagcttccggaaaggcgaaacaaaaaatacagagtgagctttccgacagagtcagcacattgttaaaagacggcgtgaagatttatacggcgctgaatccgtatatgcaaaaccaggtcgtcgcccaagtgaatcaaaatctgccgtatgcaggcgtccagggcggagcggccgtgattaatcatcagacacatcagattatcgcgctttcaggcgggaaagattatcataaatatgatttcaaccgcgcctatcaagcatacagacagcccggttcatccattaagccgctgcttgattacggaccttacattgaaaagaccggcgcaacgccacacagcaaaattgacgcaagcaaattctgcagtgcggattactgcccgcagaactataataaccgcacatacggcacggttacgctggaaacggcgtttaaatactcgtacaacacaccggccatcagaatcatggaccgcgtcggcgtcaataaggcgttcagctaccttgaaccgtttcatttcgcgaagctggtcagcgcggattaccgcctgcctgcggcgctgggcggttttacaaacggcatgacgccgcttgaaatgaccaatgcgtacaccacgttcggcaacaacggcgtttatacgccgagtcacgcgattacaaaagtgactgatttaaaaggaaaaacgatattaaaatggaaagatgagccggcgcaggtattcagcgtgcggaccaacatgcagatcaaagaaatgatgaaagccgtcgtcaaaagcggaacaggaaaaaaagcgaactttaaagctccgtacgtcggcggaaaatcaggaacgtcaaatgactatcacgatatgtggtttgtcggcctgacggacgcttatacgatgggggtatgggtcggcaaggatacaccgtcaagcgtcgaataccttcatgacgcaagccctcagctttcgatctggaaaaacacgctgcaggcagcttattaaagataacggaggggatccgctttgaaaccagctcagcttccggaccgcgtgcttttgtttgacggcgtctgcaacttatgcagcggcgccgttcaattcatcattaaacgcgatccggccggcaaaatctcatttgcttcattgcaatcagataccgcccgggagcttttggcatcagaaggacttccgacagaacaatttgacagcatgatttttatcgaaaacgggcggatatacaaaaaatccgcagccgtgttaaaggtttcgcgtcatctccgcggagcctggcggctgtcagcggtttttttcgcagtgccccgcccctcagggacagagcctattctttcatcgcccggcgccgttacaaatggttcggaaaaagggaagcatgcatgctcccctcccctgagatcaaaaacagatttctgtcttaacaaaaatggctagcttacacaggtaagctagccattatgctattataaagcttgataaagatgtacaaaataccgataacaaaagtaaaccaaaacagaatctcaagcaatataaaaccgatcagcgaaacgatcgagagtgtcgaatagattctgtacaccatgaaaatcaaataaatgagcgtaacaacggcaaataacgccgcaatccaaaaaccattctgcacgaacgcaaaggaaagaattcctccgcctacataaattaaagagcctaatctgatttttttcagattgtccccctcagggtcatttgtgaaaaacaaaagagacagctctgtcactgtgtttgcaatcagcttcaaagccgaaaaaagcataaaatacacaagggcgaacgctgcaaaaagcgccagtctgatccctttctcagagaaataatccagcatcccctgatacatgccgagcgtctgaagtatcttcatgacataaagcgaggtagaaatggataatgacgaactaaaaagcagaatcgcaacgagcggaaaataacccgtccaataagtatttttcatataaaaagtccctttctgtaatctacctcacttattatggaggacttaaaacacattgacaagataaaaaattccatttttcctcacttttacgaaataagggcctgatcttcacaaaccggctttttcggagtaaagtagaacgcgggaatgataaacgtaaggaaggctgttatgaaaaaaacattaaaattgcaaacccggttaacgatattcgtctgtattgtcgtccttatcgcactttgtatcacctttttcacgatcagcgtccagaccgcggaccgcgtgaaagaagaagaacggacaaccgcgctgcgcaccgcaaagcttgtcgcggaaacaccgagtgtcgcgcaggcattgcaaacaagaaaagggctgaaagagctccggaattatacactggatgtccagcatacgacaggaaccgaatttgtcgtggtgatggatatgaacagcatccgcctcacccaccccgacgcaaataaaatcgggaagaaattcaccggcggagacgaacagccggcgttgcacggccatatcaaaacgagcacatcagcgggaactctcggaaaatccatgagagccttcgtaccgatctatggaaaagataaaaaacaagtgggcgtcgtttcggtcggaatttcgcttaacaaaatacaggatgtcgtcagccacagtttgagaccgctttatttcatcatctgcgtaagtatttttgtcggcgtcatcggagccgtcattgtcgcccgcaccgtcaaaaacattatgtacggtcttgagccttatgaaatcgccaccctcctggaagagcggagcgccatgctcgaatcaacgaaggaaggcatccttgcggttgacgcgcggggaaaaattaagcttgccaatgcagaggcgaaacgactttttattaaaatgggtattccgactaatccggtcgatcaagatgtgaacgatattctcccgaaaagccggctgaaacaggtgattgaaacgaaaaaaccgcttcaggacagagatatccgcattaacggacttgagctggtctttaatgaagttccgattcatctgaaaggacaaaccgtcggagcgatcgccacgttcagggacaaaacggaggtcaaacatttagcagaacagctgtccggtgttaaaatgtatgcaaacgcattaagagcccagtctcacgaattcatgaataagcttcatgtcattttagggcttgtccagttaaaagaatacgatgatctcggcacttacattaaagacattgccattcagcagaagacggaaacaagcgagattataagtgatgtcaaaagtccggttctcgcagggtttcttctgggaaaacaaagctacatacgcgagcagggcgctgatctggacattcagctcggcagcctgattccgaatgcggcggatccggccgtcatccatgagctcattacgattatcggaaacctgttaaacaacgcgctcgacgcggtggcgcagatgccgaaaaaaaacattacgtgctcgatgcggtttcaggatcgccagcttgacatagagattacggacacgggagccggaatgtctgcggcagaccaagcccgtatttttgaacaaggttattccacgaaagggacaaaccgggggttcggcctctatttcacccagcaggcaacagaaaatttaaaaggccatatgattgtgacaagtgaaaagaatgaaggaacgactttcagtcttcgcattccgtatgaaccgaaggaggaaaatgatgattaatgtactcatagttgaagacgaccccatggtgggtgaattaaataagcgctatctcagccagattgaaggatttcagctgaaagggatcgcatcatcctttcaaagcgcgctgcacgtgctgagcgagcatcatatcgatctcatccttcttgacatttacatgccgggaaaaaacgggcttgagcttttaacggaaatccgcaagcagaatgaatcggttgatgtcatcgtcatttcggccgcaagcgagctggacgtcattaaaaaaacgcttcggtacggcgccgtcgattatttaatcaaaccatttgaatttgaccgctttcaaaccgctctttccgactacagacgcaagcagaaagtttatcaatcacacagaagcatgacacagaaagaattggatgccgagctttttcaaaagaaagaagcggcggaaaaggttcaccttccgaagggattgacaaagagcacgcttaaactcatctgggcgagcattgagtctttcggcgacggctcttttaccacggaagatctcgccaagcatactgaaatctcgcaagtctccatccggaaataccttaaatttctggaagacatacaagtgctgaatgtagagatggcgtacggcacgatcggcagacccgtctttcaatatcatatcaacaccggcaatgtcagcagcatcaaacaatatttataatgtcaaaaagcgccgtttcgctgtgaacggtgcttttttactgtcatatcccgtgacaaaaggcttgagattcctttttgatatgctatataaggataatgacccggctgatcctcctctgttttaaccagatgaggaagccgattcataaaattgatattttttaaaaaataagcaaatttctatttatttatggcgggtaaaatgataaattatgattggttagcagatcttttcagataagtcataagtcccgaacccggaagagacagccgctcaaggcgggaaaaagagagacgtctcatcattattatcagaaagttttttcgattctgcatccggcacggggactcaagtctgaattgaacggcacagccatattttacaggggggttatatctttgaaaaaacgcaaaatcggaatggcgatggcgctcatcgcagcggccggaaccatattaagcgcatgcggttcaagtgacaaagcaaacggctccggcagcaaaaactttaccgtcggcatggtaacggatatcggcggtgttgatgacaaatcatttaaccagtccgcctgggaaggcatccaggcattcggaaaagacaacgggcttaaaaaaggcaaaagcggttttgactatcttcaatcaaaatcagatgcagattatacaacgaacttaaataaattagcgcgggaacactttgacctgatttacggcgtcgggtatctgatgcaggattccatcagcgaaatcgccgatcagcgcaaagacacacattttgcgatcattgacgccgttgtcaaaaaagacaacgtggcgagccttacatttaaggaacaggaaggttcattcctcgtgggagcggccgctgcgctatcgagcaaaacgggaaaagtcggattcgtgggcggaatggagtccgaattgatcaaaaaatttgaaatcggcttccgcgcgggtgtacaagccgcaaatccgaaagcgaccgtcgaagtgaaatatgcgggcgggtttgacaaagccgatgtcggcaaggcgacggctgaaagcatgtacaaatcaggcgttgacgtcatttatcacgcggccggcgcaacgggaacgggcgtcttcacagaagcgaaaaatctgaaaaaagaagatccgaagcggaacgtatgggttatcggtgtcgataaagaccagtacgcggaaggccaagtcaaaggaacaaaagacaatgtcactctcacatcaatggtcaaaaaagtggatactgccgtggaggacttaacgaaaaaagcgagtgacggtaaattcccgggcggcaaaacattaacatacggtttggcgcaagatgcagtcggcatctcggatcacaaggagaacctttctgacgatgtcatcaaagcaacagacgattggaagaagaaaatcgcggacggactcgtgatcccttcaactgaaaaagaattgaaatccttcaaggctgagtaagaaccaggggataaggagactttcgtgcttatcccctctcttttttgaaaagagcggtgaaggaaaagctgcatctcttgcagcttttcttttgccaagctctttctcatcaaagtatctctgaaaaggagcgacaaatcggtggattatatcattgaaatgcttaatatacgcaaggaatttcccggaatcgtcgccaatgatgacgtcacgcttcaagtgaaaaaaggcgaaatacacgcccttctcggtgaaaacggcgccggaaaatcgacactcatgaacgttttattcggcctgtatcagccggaaaaaggcgagatccgggtgcgtggcgaacgcgttcacatcaacagtccgaacaaagccaacgatctcggcatcgggatggtgcaccagcattttatgcttgtggataccttcaccgtctcagaaaatatcattctcggaaaagagccgaaaactttcggccgaattgacagacagcgcgccgcccgggacgtgcgtgatatttccgaccgttacggcctgcacattgatcctgaagccaaagttgccgatatctccgtcggtatgcagcagcgggcggaaatattaaagaccctctaccggggcgccgacattctcatttttgacgagccgaccgcggtgctgactccgcacgaaattcaagaactgattcagattatgaaaaatcttgtcaatgaaggaaaatcaattatcctcatcacccacaaattaaaagagattatggaagtctgcgaccgtgtcaccatcatccggaaaggaaaaggcattacaacacttgatgtcgcacatacggatcaagatgaactggcaagccttatggtcggacgcgaagtgtcattcaagacggataaacagccggctgaaccgaaacaagaagtgctttcgctttctgatgtaacggtgaaagacgcgcgcggcgttgaggcggtcaaacagctctccctctctgtcagagccggtgaaatcgtcggcattgcgggcgttgacggaaacggccagtctgaattaattgaagccattacaggtctcagaaaaacaaatgccggcacgatcatgttaaacggcaaacagctgcaaaatatgccgcccaggaaagtcactgaagccggaatcgggcatattccgcaggacagacataaacacgggctcgtccttgattttccgatcggagaaaatatcgtgctgcaaagttattaccaaaagccctactcttctttcggcatattaaataaacacacgatttatgacaaagcgcgaagcctgattgaagaatacgatgtcaggacacctgatgaatatacgcctgcgcgcgctctctccggggggaatcagcaaaaggccattatcggccgggaagtggacagaaatccggatcttttaattgcggcccagccgacgcggggactcgatgtcggcgcgattgaattcgtccataaaaagctcattgagcagcgtgacgccggtaaagcggtgcttctgttatcttttgaacttgatgaaataatgaatctcagcgatcgcatcgccgtcatctttgaaggcagcatcatcgcaaacgtcaatccgcttgaaacaaacgagcaggagctcggacttttaatggcgggaagtaagcaaatggaggcggggaaaacacatgattaatcgactttctcatctggctgtgccgctgattgcgatcatccttggattagctgcgggtgcggtcatcatgctcgccagcggctacaatgtcgtaagcgggtattcggctctttggagcggcattttcggtgaagtgtattacatcggggaatcgatccggcagattacgccatatattctgtccggattggccgtggcattcgcatttcggaccggcctgtttaatatcggggttgaaggacagctccttgtcggctggaccgccgcggtgtgggtcggcgtttcctttgacgcccccgcttacatccaccttccgctttcgttattggcggctgcggctgcgggcggcatttggggcctgattcccggatttttaaaagcccgtttttttgtccacgaagtgattgtcacgatcatgatgaattatatcgctcttcatttaaccaattatctcatttccgatgtcatgacggaccaccgggacaaaacagacaaaattcatgaaagcgcgtcgctccgctcgccgtttttagagcagctgacagattactcccgccttcattggggcattctgatcgctctgtttgcggcagtcctcatgtggtttatcattcataaaacaaaaagcggatttgaattccgggctgtcggctttaaccagcacgccgcacaatacgccggaatgagcgtcagaaaaaatatgatgtacgccatgatgatttccggggccttcgcagggcttgccggcgcgatggaaggactcggaacctttcaatatgcggcggttaagggcgcctttaccggcgtcggcttcgacggcattgcggttgcgcttctcggcggcagcacggcaatcggcgttgttctggcggcatgtcttctcggcggccttaaagtcggggcattaaatatgccgattgaatccggggtgccttctgaagtcgttgacatcgtcatcgccattattattttgtttgtggcatcaagctacgccatccgtctcatccttgataaattgaagaaaaagggggcgaagtaagtggacttcctgcagattttatccattattgttccggcaacactcgtatatgcggctccgcttattttaaccgctctcggcggcgtgttttctgaaagatcgggggttgtcaacatcggtcttgaaggactgatgattatcggcgcctttacaagcgtcatgttcaacttatttttcggacgcgagcttggcgccgccgctccgtggctcgctctggctgcggctatgattgccggcggactgttctcactgatccacgcggctgccgcggtttctttccgcgccgatcagacggtaaccggtgtggcgatcaatatgctcgcgttaggagcgacactgtttatcgtcaaactgatttacggaaaggcgcagactgataaaatcccggagcccttttacaaaacgaacattcccgggttaagcgatattccggttttaggaaagattttcttttcagacgtatattatacgtcgattttagccatcgtactggcctttgtttcctggtttattttattcaaaacgccgttcggccttcgcatccgttctgtcggggaacatccgatggcggccgatacgatgggaatcaacgtgttcggcatgcgctatatcggcgtcatgatcagcgggctgttcggcgggctcggcggcggtgtgtatgcttccacgatcgcgcttgatttcacgcactccaccatttccggacaaggctttatcgctctcgccgcgctggttttcggcaaatggcatccgatcggcgcgctcggggctgcgctgttcttcgggtttgcgcagagtttgagcattatcggctcgcttttgcccctgttcaaagacattccgaatgtatacatgctgatggctccttacattctgaccattctcgcgcttgccggcttcatcggccgcgcggatgcgcctaaagccaacggcatcccttatattaaaggaaaacgctgattgccacacaaaaagagttccgcaccctggtgccggaactcttttcatctatatacgattctgatatactcacgcggctgaaacggcgtttgcattgattcagccgcactcagcttgtcttctgcgtattccgcaccgagaaaaaaatgctcccaatcatctgcttccgtctgctgccgcgttttgcagaaatcatcaactatgaatgttcctgcaataatagaacaaaatattccaatacaggccgccgcctttctcttcatctgaccagctccttttgtaaagcttgatctgaaaaagaaatgtatatacaaagatccggatatttgataaatttattttgggttcaaaagaccacaaaaacacaaagaggaatacattatgccgtagcagggtaaaaaaaagtgcgatataatttgtactgggtcctatgaccgtgaattgattgattcattcttacataaagcagttgcttgatgaaaaaacaagcaaaggaggtcttctgttgcagctgttacatttcgcgattttggcgccttttttatttgcatttatcgttccctttctttataaacgggtaaaacaagtccatacaggctggtttgtgctgatagtgcccgttgtgctgtttgtttactttatcagcaagctccctgtcacaatggctggagaaaccgtccggtatgcggccgaatggattccgtccctcggtattaactataccgtttatattgacggactcgggctgttattcgctttattgattacgggcatcggctctttggtgacgctttacagtattttttacttatcgaaggacaaagaaaagctcggccctttttatgtgtacctgctgatgtttatgggcgcgatgctcggcgttgtgctcgtcgataacgtcatcgtgctttatatgttctgggagctgacaagcctgtcatccttcttattaattgggtattggcataagcggaagaaatcacgctacggggcggaaaaatcactgctgattaccgtcggcggcgggctgtgcatgctcggcggctttatcctgctgtatctgatgacggattctttcagtatcagggaaatggtcaaccaggtgcatattatcgcaggccacccgttctttattccggcgatggttctcctgttattgggggcctttacaaaatcagcgcagtttccgttttatatctggcttcctgatgccatggaggcgccgactcctgtcagcgcctatctgcactcggctacaatggtgaaagcgggtatttatctgattgccagattcagtccggtttttgctttttcacccgtctggttttggacggttgcctcagtcggtctgatcacgatggtatgggcttcctttaatgcgattaaacaaaccgatttaaaagcgattctggcattttccacagtcagtcagctcggtatgattgtatcgatgctcggcgcaggagccgccgcgcttcattatgagcattcagagtattttacggcggctgtcaccgcggctgtgtttcacttaattaaccatgctacttttaaaggaagtttatttatggcggccggcattatcgaccatgaaacgggaacgcgggatatccgcaggctcggcggcctgatggcgctcatgccggtaacgttcaccgtttcactgatcggaacgttttccatggccggtctccctccgtttaacggctttttaagtaaagaaatgttctttacaagtatgctgcggattgctcatgcagatattttcagcctggatacgtggggcgtgctgttccccgttctcgcatggatcgggagcgtcttcactttcatctacagcatgaagctgtttttcagaacgttcagcggcgcgcgcaaaacggatcagcttgaaaagacgccgcatgaagctccgctcggcatgctgatttcgccggtgattcttgccgcttgcgccgtcagtctgttttttgctccgaacgttttgtcttacagcctgattgaaccggcgatgaactccatttatcccgctctgttaaccggcggagatacattccatgtccatatttcccagtggcacggggtgacggctgaggtaatgatgaccctcggcatcatcattgtcggcacgatcggttacgtaacgctgtctaaatgggagcgtctgtacggtctgtttccgaaaaaactgacgctgaacaagctttacgatgcggtgacgggcagtatggaaaaaagatcttaccagctgacgtcatcttatatgaccggatttttgcgggattatctgctgtatatctttgcgtcgtttatcattctcatcggagcggcgttcgtcatgaaaggcggcttttccatgacagcgaaaggaatggctgagatcggcctgtatgaaatcgtgctgtccctcgttatggtgaacgcaacgattgcgactgtgttcgccaaatcacggctgacggccattatctcactcggtgttgtcgggtacacactcgcgctgtttttcgtgattttcagagcgcccgatctggcgctcacgcagctcgtcattgagacgatatccgtcgccttgtttcttctttgtttttaccatctgccgaaaatgcggcggaaaaagaagacaagaacattccggatgacgaattttatcatttctctcggtgtcggcgtcatcgtgacaatgctcggaatcgcgtcttccagcgaaaaaacaaaagacagcatctcctcctttttcaccgcttacagccataagctcgggggaggaaacaatatcgtcaacgtcatcctcgttgatttcaggggatttgacacgatgtttgaaattacggtgctgtcgattgccgcactcgggatttacggcatgatcagaacaaaagtaacagaggagggagaaaagcgttgagacagccaaaaacaaacgacatcatccttcagacggcaacgaagcttgtatcttttatcattctgcttttctctttctatttatttttatcggggcataacgcccccggcggaggatttgtcggcggactgattacgtcttcggccatcgtgctgctgcttttggcctttgatttaaaaaccgtcaaatcgattttgcccgtcaattttatttatgtggcgggcgcgggtctgcttatcgcgattgcaacgggtgcaggttcgttcttattcggagcgccctttctcacccatacattcggccattttcatctcccggtgctcgggaatacggagcttgcgacggccactttgtttgatttaggtgtgtatctcgttgttgtcggcgtgacgatgaccattattcaaacgattggagaggaagaatagtggaaatcttaatgtctgtcattgccggtattttgtttatggcggcaacctacctgctgctttctaaaagtctgctgcgcgtgattatcggcaccgcgcttttgagccacggcgtccatttgctgctcctgaccatgggcggactgaaaaaaggcgctcctcccatactgggcggaaaaagcacgtcctttgtcgatccgctgccgcaggcactcatactgacggcgatcgttatttcgttcggcgtcacgtccttcctgcttgtgatggcgtttcgcgcctatcaggaactgaaaacggacgatatggatcgaatgaggggaaatgatcaacatgaataactttgtgatattgcctattctggtgccgctgcttgccgcagtgctgctgatttttatgaacaggcacgtgatgctgatgcggatattcagcactgccgcttcctgtgtctccatcgtcatcagcgccgctctcgttcagacggttttcacacacgggattcagacgctgacactcggcggctggaaagcgccgtacggcattgtgctcgccgcggatcagcttgccgcactgcttgttttgacaaccgccataatcgggctgctcgtcaccctgtactccttccgctccatcggagaaaaaagggagcgcgctttctattattcaggggtgcagtttcttctggctggcgtaagcggagcgtttttgacgggtgacctgttcaacatgtacgtcttttttgagcttctgcttatcgcgtcctacatgctgatcgtgcttggcggaacgaaaattcaattaagagaatcattgaagtatatcgtgtttaacattgtgtcatccgcgttttttgtcatcggtgtcggttacttatatgcggtgacgggcacgctgaatatggctgatctaagcgtaaaaataagcgaatcgggccagaccgggctgataaccgtcatcggcatccttcttctcgtcgttttcggtttaaagggcgggatattcccgctgtatttctggatgccgggctcttattacgccccgccggctgcaatttcggctttattcgggtctcttttgacgaaagtcggcctgtatgccattttaagagtattcaccctgatctttattcacgatacgggctttacccaccaattgatgatgtggcttgcgatgctgacggtgctattcggcgtaatcggatctatcgccttttcggatgtcatgaaaatcgtcatctacaatattattacagccgtcggcgtgattttgttcggcattgccatgaacacgccggcctccattcaaggagcggtttattacttgattcacgatatgctgattaaaggagcgctgtttatgcttgccggcacgcttatcgcattgacaggcactgccagcctgcataaaatgggcggactgatcacccgttatcccgttttaggatggatgttctttatttcagccatatctttggccggcatcccgccgttcagcggatttgtgggcaagctgaagatcgcggaaggcgggttcgataagggggaaacattgttttccgtattgattcttgtatcaagcctgcttgtgctctattcggtgctgaaggtttttacgacggctttttggggcgaagaaaaagaaatccccggcgcaggcggacggtccgcaaaaggacttctttatccggcagccgcttttctccttttgtcgcttctgttcgggctcggaaccgaatgggtttcaccgtatgtcaatcagacggctgagaatctgctgaatccggaaaaatacattgaagctgttttgaaggagtagatggcatggcttttcaactattattaaacgttcttctcgctgtttgctggatgtttctcacaaacagcctcagcacggcgggttttataaccggatttatcgcaggcttggcggcgctgttttttttccggcgcttcttctcgcggccgttttacatttggaaaatatggtcagtcatcagactggtgctgatctttataaaggaattatatttggccaatgtcagcgtgctgaaaaccgttatagcgccgaaactgaacatccgcccgggcattttcgcgtttaagacggaattgacggaggattgggagatcacgttgctctcgctgttaatcactttaacaccgggtacgctcgtgatggatatctccgatgaccggtcgattctctatatacacgccatggatattgaagatgcggagaaagcgatccacgacatccgcgtctcttttgaaaaagccattcaggaggtgagccgctgatgtttacgtttattctgcaattatcactcggcattatggcggtttcgactcttctgtacgtcattcgcgtcatgaaagggccgacgataccggaccgggtcgtcgcgcttgatgggatcggcattaatctgattgccatgaccgcgcttgtatccattctcttaaacacatcggcctttttggacatcattctgctgctcggcattttatcgtttatcggcacgattgcctttgctaagtttttggagaaaggagagattatcgaaaatgatcgaaatcgttaaatgggccgtcgccgtttgtattctgatgggatcgctgatctgcctggtcgcgtctttcggcacactcaggcttcctgatgtgtatacgcgcgcccacgcctcttcaaaaggctcgacactcggcgttaatttggtattgctcggggtgttaggctacttgtggatgctgaccggagaaatttctgtaaaaatactgctcggcatcatttttatcctgctgacggcgccggtcggagcgcacctcatatgcagggccgcgtacaattcgggagcggcgcttgataaaagaagcgttcaggatgattacaaagggatcagaaactttgtgatcaaacgaaaagaagattcatatttgtaaaaacaaacagccggacgattcagggttccggctgtttgtttattttgttataacagccagcgtacagcgggaaacacagatcagcctttctcgttcatcgaaaatgttaatcccgtacacaatggttgccctgcctgtgtgaacgggttccgctatcgccgtgaccgttccgccctctttcactgactttaaatgattggcattaatctcaagcccgacacacgcctgtttcgaccggtcgataaaatgctgggccccgacacttgcagcagtctccgccagcgctgctgacgcgcccccatgcagatatccgaaaggctgcaccgtcctcttatccaccggcatcaccgccacgcatctctccggcgtgttttcagtgatttcaataccgagtgcgccgagcaatgtattgttcagattcataggtcattctcccttcaagatttatagtacgttatctgacttggcgatcagcaccgcttcagttcgggagccgacattcagcttattaaaaatggatgtcaggctgtattcaatcgaccgcttgcttaagtgaagcgcatctgcgatttcctgattggtcaaacctttttcgacctcttggagaatatggcgctctctcggggttaaccgatcctgctcactttgaggggaagaagacgtttttgttttttgctgggtcatcagctgtttgaaataggagaaatcaactaaaatctgtccgttgagcacgtgatatatgtattgcatgattttctctttagattcggttttgctgatggcgccatgcaggcccgcgcggatggattcttcaaaataatcttcaacctcatagcctgtgtagacaatgattttacagagaggattctcttttaagattttcttggaaagctcgatgccgctgatgtcatcacccagatttaaatccattaatatgagatcgtaagctgaaaaatcatgccggagaacgaattgttcactggcatcaggactgaggcaatcgacagaaagattcgtgtccgtttccagaatcgtcttggtgccctccatgacagccggatgatcatcaatcactagtatctttttcatggtttcctcccttttactcactcatttccattttattaaaaagacttggcttctgccaagtcgatttggtgataaaatggttacaattccatttcaatatccgctttaaaaccgtttccttcacttgtgtcgattttcatccgtccgtcaagcgcacggacgcgctccttaatacccgaaagacccatgctcatcgactgtccgccgccttcttcctgattgcagccgacaccgtcgtcttcataatgcagaatcactttattttgaatgctgatcagcataatcagcacctcattcgcctgtgaatgcttcatggcgttcgaaagaaattcctgaataatgcggtacaaattcagctgcgtatccaaatccagcgccgccgtaaaccggcccgtattcagacggatatgaaacggcgcacgctcttgctgctgcgcggcaagcttggataccgccttgaccagacccaaatcatacagcagctgaggccgaagctcatggcacgtctcccgggtcatcaaaatgacatccgacatctgctcattcatctgatgaagcttgtcctgcacctctaactggcaaggctcctctttcttaaaatcggccagaaacagctcacactggcgcttcaaagaaatcaaatcctgcagcactgaatcatgcagatcacgggccaaatccgaacgctgcttttcctcgatcgtaaacatcagctttttgagccagaccgggtttgagccttgttgtttcaggtcttgtaaatggttcatgagttcttcgatctgcaatatgttttccatcgaaacacttgtataaaaagacaatgtctttaaccaagatatctcatctcttgtcagtctcggagtattaatgctcgacaaacaaagcagaacgtatgagtttgcccctctttctccaatcttcatcagaaaaccttgatttacttcaaaaatcttgccaatctctgatgagactttaacaaattcttttttatacggctgccagttcggttcactgttctgtttatcaaaatacagaatatctccgtcagaactgatttcaaagatatatgccttactgacaggcaacacatctaatatcgtctttttaagattcataaacacttggtttaaagctgatacgcttttaagaagctgtgtatatttaaatatgctgtcttgataattatatttttctgaaaaacgtttcaggcgaaatttgtagtctaataactccttaatataaaataccgctaaaaaaatcaaaaatacatatacagtgatttgaataatgttaaagttattccccttgctgtcgaataatatattcagccatacaactccaatagtcggaataatggaaaggaaaccatagtatctaattctgcccaacaagaagtctatatcgtagattttattgaccacgaattgatagactaaagctaatggaataattattaaaaatggtgccgtaactatagcagaataaatatactgtccgaacaacacctcaggtataatataaaatactgtaaacggaaaaaaggctatggtattagatataagtaatactttcagcaaataaaagtgatccttttttcggtagactagtccataaaaaataatggatgtatagacgaccatcatttccaaaaaaaatgttactaaattaatattcgtaacaagttggaaggcaaaatgcttctggaatatctcgattattatattaataaccggcaatatatagagagtagacacaacataaccagctgaaaatttcaattttaattctttaaagtattgatacaaaaagtgaaagtataatacaggtacgttcaaaaatgtaaaaaggttaatatatctgtttatttcatatcctctagttactccacctgcgcttaaatatgcaatggatgtacacaataaaaaaataatcaaaataaaggctgaataagtatcttttactctgttaactttataaatataaaaaatgcataacatgcttaaagcaaataatatgcatgggataatatagataaaaaaactataagagctatttaaggaaataaactcagtattatgtaagtctattttactattaccccttattattttcatatgttcagctttcgctagatattgacctcttatattctcttctgtcggtgtttttccgcttatttcaattatcctgtctccctcttttaagcccatatatttaccatacgtagacttggagagttttacaacctgcaattcatggttattgttttcaaccacataggttcctaccaaaattccgttttgagtaaaatatataatatgagcgacgtaaaagagactgacgaataacaatacaatcgaaaaatttctaatgaattttttcaatagatctcactctctcaatcattgttcccaaaaaattcccctgcatttttttgattgacttaagtccctttcaaaaatctcaacaatggcaggtaacagtttatccggaactcctattaaactagcttccccacacgctaactttgtaagtacaagtggattttccataagataatgtacgatatcttgcttcactgtaatttcctccattaaagttctaacattatatttaaatcttttatacttgtcgtaatttcttcctcgtacattttaattaacattgaaacatactggctaactcctgcatcaaatagtaggtcttcaaggctttttttattatcaatgaggaatgaatggtaacttgcttctgcattcattaaatccaagattttttctgaagcagcattaaatcttcgctttagatacaacagaattaatgtttttcttccctttctgatatcactacgatttttattaaaaagaccataataatcattttcaatctgtttaacaattccaattttataggaataattctcaatttcttcgttaaactccccatttgcaagcattgttcctaatacagctgacattgcagtaagcgagcctgatttttgtttaatcatttgaagacattcgtcttcagtttcggggaaattttcgaggtcattatgctgaccttgcattgcatttaaagcatatttcatagcaagccggggaaaatcggagttcgttttaagctcacaaatcacttgaagacttattgaataaagagaagtggctgcatttaaagagatagattgatctatcttcatccattccttatccaagttatcttcatcctctatatcgtcaaaaatatcaaaagctaaaattaacaattcaattcctgaagctaataacgtaatatccgaataatgctcaccatcgaaagccacataatgcttaaatgcaagaacaccaaaagcaaaatgatttttttcatttataaaagtctgaagggtgtcttttaaatgtggattatttattttctcctccacaatttccttcatcttctctttaatcgtttcggcatctaaacacatttgctcaataattgtcttcaccctcccattctattttactaaatgcaggtgatgaaagacagcaggtttttcgttttttaacaatcgtataatactttatccatgaaatggataaaaaatgcacaaaaaaaagacttgtttccaagtctttttaagaaattttcattgcatatgagaatttatcgagctgatcaatgcttttgttaatgtttcgtaatgagtcggttgtttctctgatatcattttcaagtcggaataataattgctttacttcttctaatttgttttccaccgtttccacactcctttttttgaaagatcaatgaattgtgtatggtgaacgagtcctaggtatttgatctgttactaatagtgtaaacgtttttgcgggatttttcaccgaaaagtatgtgtaaaagtatctgcgtgacaccgcaaaccaaggtaattccatagtcccgaacagggcatttagcgaacaggactatataactaccgcaaaggcagacgtttaggataaagcagaccaatctggcggttctgctgttttttcaacggttttccgacaaaccggcagggactatagtccctgccgtcacaatttcaaaacagaatgggcaaacagcgtcgcataaccaccgacaaacaccgaaaagaccgcaacccccgcattgtggtctttttgcatgtcataactcattatcacgccgcctatactcatgtataacgaatgttttctcaggaaggaggccgccgtatgcattatgtgtatccatgctgccctgttttcgccgcgccataccggcatccagcgcccagtgccccggttcacgcagatattttgacagcgtccgcaaaagaagctgcgggcatgctggaggatgcgcgcctgctccttgcgcggctgtcggcgtcaaaagagcttgcgcgcagcatcctcaccgcagcgcaatcatctgacaccgcagcggtcaagcggctcattaagcagaccggcatcaaaaatgactttgacgtgacgtataatcccgacggcatccgtgtcagtctgatcagagagcaaagccggtttatcatcgccctcagatggtcggcttaaagcggctcaatcgatcagctgccggcaccattcgatcgcctgtaagtaacattcatacgcttcttctttgttcagttcttttccccactcgtcacagtcccagttgttgcattcaatggctttgacgagcgcgagcatcttataataatcgttttcataaccgagcagcgcctgtccgacttcatcgattaaaggcagttctttgatgatatcctccagttccctgtggagaagcgtatcgatgagcgaaaacatgccgatcagcatgtaagaagagggctggggccttccggttcttttcgccagcagttcgcacagtttggccctgattaaggaaatcttaatgatttctttttggcttgagtggcttttcgccgttaaatctctgaatgaaagaatgtaaatcaagcgcttaatctcattcagcccgagcatcatgatggcctgctggatgctgtctatcttttttttcagtcttgtttgcgatccgtttaaaaaacgcagaatctgatacgataagctgacgtcacgctctatgtattccgtcacgcgctgtatattaggctggtcattgtttaattcgcttaaaagctggtagtaagaatgaaaatgaaacgtcagatcatttccgctgatgacacgcggttcactgaaaaaatatccttgaaacaggtgaaagccgtctatggccgcctgtttataatcttttctcgtctccactttctccgctaaataaatcagacttttacagctgtacgtctgaatgatttttttgcgctccagacgcgaggattgcaaaaagtcgatttttaaaatatcaatatatttcatcagctgttccactaactcttcattttccggattgatggcgtaaaaatcatcaagtgctaatgtatatcctaatttcttcagctgtctgcatcttgagatgagcgccggagtgatcggtatgtcctcaagaatttcgataataagctggtcaggatcaaaggaggtagggagatctgaaaacatcaggctttctgtaaaattcacaaagcagcgtttcccctcagtcagcttttcgattccgatgttgataaagctgttaataatgagatccgtcgtagctttatctccatccgcggccgaataacggttctcttcgctctcccggtaaagaagttcataagcaacaacctgttcgtttctgttgaagataggctgtctcgcaacaaacaccttcattcatttacccccttagatgcggccttcgaacataagtatatcaaataacttgacgaaatttgtctaaatgtgaaaaatattatcacaacaaaaaagcctttccagagataggaaaggccgctttgttttctattcaagttcccgtttcagcttgcttttgatttcatgaatccgctgcatcttgttgctccagcagtcttcgcttaaatcgaccggatattcttccggcttgctgatccgtttgtattcctcccacagaagtttgaggttatcctgcacgtattgctggatgtcggtaatttcgggattatcatagcataaaacgccgttttcaaagatcggctcatgcaagtctttcgcatagaagtcagtgacgaatttgctgacgaacgtgtggacgggatggaacatttttaagcgtttctgatcatttacccgctcgtcataaagcgcgatataatcaccttccgagtggtgattcagcttgttgataatccggtatactctctttcttcccggcgttgtcactttttcagggtttgacgaaattttaatggtgtcggtcagtttgccgtcctcttcaatggcgacaagcttataaaccgcgccgagagccggctgatcgtatgcggtaatcagcttcgtgccgatgccccacgtatcgattttcgctccttgggatttcaggtttaatatcgtgtgctcatcaagatcgcttgaagcaatgacctttgcgtctgtgaaacccgcttcatcaagcatttcacgcgctttttttgacaggtacgccaagtccccgctgtccaggcggatgccgatgaagttgatccggtcgccgaattcctttgcgactttaatcgcattcggcatgcctgaacggatcgtatcgtacgtatctacgagaaatacgcagtctttgtgggtctccgcatatttcttaaatgccgtatattcatcgcggtacgcttgtacgagcgcatgagcgtgcgtgccggataccggtatattaaaacgctttccggctcttacattactcgtcgcgctgaagccgccgatcaaagccgctctcgctccccacatggccgcatccatttcatgggcgcgccgcgttccgaattcgagggcgtcttcatcaccgacaacgcctttaatgcgggccgctttcgtggcgattaatgtttggtaattcacaatgttaagcagagccgtctcaatcagctgcgcttcaatcaggggtgcttcgacccgcataatcggttcattgttaaaaacgagctcgccttctttcatgctgtaaagagatccggtaaaagaaagatcccgtaaataatcaatgaaatcatcagcatagtgcaattccgtttttaaataattcagatcgctgtcggtaaatttgaagttctccaagtattcgattgctttttctaagcccgcaaataccgcatagccgttttcaaagggaagctttctgaaaaaaagctcaaaaatcgcttttttctcatgaatgccgtctctccagtacgtttcggccatattaatttgataaaggtctgtatgtaaagacaaactgtcgtctttaaaaccatgctccaccaaaattgttttccccttccttactctgccacttgcgctccgatgctgttcttaaaatgggacagggcccattcatgcccttccggattaaagctggccacagcgttttgatgaatgacgatctgaaagcccttgttgtaggcgtcaaccgccgtgtgaagaacgcagatgtcggtgcacaggcccgcaagatgcagctcagtgatctgccgttcccgcagtttcagctctaaatccgttcccgcaaaagcagaatatctcgttttttccatataatttacgttttttgcgtgtttatgtttctcataaagaggcgatagccttccgtacagctctttgccctccgtgccgttgatattatgcggaggaaacaggcgtgtctcgggatgaaagtcatcgtctgcatcatgcgaatctaccgcaaagacaacgtaatcaccgttttctataaatgcttgcgtcaaactgacaatcgtatcttcaatctgtctcgcgggttctccgcaggttaatgccccgttctcagctgcaaaatcattcgtataatcaatgcatataaatgcttttttcatagccggcctccccgccattcatatgaaaaccattatatcctatctccacttgtaagtgaattggcattgtaaaatgacaaacagtgttttgcccttttaagatttcaggagtgagcgctgaaaaatgtcatcctgcacgtaaatgccgtcaaggttcacggcataatcggcggcaaaaaccaggccgagcggcgtttcgaattgaaggtccgagatgacggagcttcggacaccggcaagtgcggcaagcttcatatatggtgaataagcatgatacgggagccttccgtttatatagagcaccgcgtcttttcggcttttcagcgcctgtttcacttcttcatacggctgcttttgcagcacctgtcccttcgtcagggcaatgatgactctttcacgcagcgagcctaaaaataaatggcgttcatccggtttcgtctgcaaagggccgtacatcccctgctgtaaataaaggtcaaccgttttgtcgctcatcggcctgtccctcccagcttgttttacaattatcgccccggacgggacgcggtaaaccgttttcgttacatttcagccacccaatgggagatcttgccggcgagctctccggcgggttcttcttcaatcagcttgctgaatgattgtaaaagccgctgcgccagcgcctttttctcttcctcataggaaatgatcgtgctccactcaagttccggaacggctacaagggtatgctgttcttttttattttcatgcagatatacatcaccgatcattccggactgcacggtaatattcgcttttctgattttcataaaacattccccttttataaagactgattctattatactacaaaaaagcgacagcctcctaaaaggaggctgtcacgcgttaaaccaatcaggttcgtcaaacacatcaatgtcttcaaagcgcgttttgctgaatttattagtaattttgacaaaatctccggaatgaaacgcccctgcccccgcgcctgagtggtcaacggctttgggagaaatggcaaacacgtcaccgaagctcgctgcagcgtctccggctaaactcataatataaatcggtcccacaattgcaggcatacccacacctccgcttttctttacagcattttatgcgctgcaccgggagttgtgcccgtttttatttcggcttgcggctgtcttcgagctttgaccgctgacgaagtttgataagccggacgatatttaagacgaaagcttttaaaaccgcgtaaaccggcacggccaggatcattgcgagaatgccgccgaaactgcccgctccgataagcagaagaataatggtgagcgggtgggtattcagccgttttccaatcacaagcggagaaagcaggttcccgtcaagctgctggacgacaacgacaacaataacggcaaacagcgccttagccggcgaatccataaacgcaataatcaccgcgggcgccgccccgagaaacggccccaggtacggaatgatattggtgacggcgatcaccatcccgagaattaacgcatacggcaggccgatgatccaatatccgataaaacatgccgttccgacaaagagacaaatcagcagctggccttggaaataggcggccaatgtgacatataagtcgttaaatattttccgaccttccgcccggtaggaagaaggcagaattttgaccgccaagagcggaaaccgccggccgtccttcagcatataaaacaaaatgaacggaacggtgatcacgacaagcgtgatattcgtaacgacgccgaacacggccgacaggcttgccgtaatattttgcggaaggctttgtaaaaatcccgtcagagactgctggattttttctatcgacacataatcctgcgtcatcatccacgtaaaccatttggaatgggataattgcgccgtcaagacttgaatctgatgaatgtaatcagggaaattgttaatcagccccgtgacctgggaagccacaatcggcccgatggcagtgaacataaaggcaatcagaccgatgaaaacgagataaatgagcaggatcgccaatgtccgggggatttttttctcaagcaggcgcacgatcggattaaaaatgaaaaacaaaatgcccgagatcaaaatcggaaaaaacagagtggtgataaaaccgaaaaacggctgaaatataaacgagactttcgttgatacgtaaataatgagcaaaacgagcaaaatttgcagcgtccaaaaatggacctttgatttcaacaagcggtttcctcctattgtcgtgtgaacttgtactgtgattgtaccaaaaaaagccgccgtgcatctatgtatctcaaaaaagaagacgcaccggggttctatagtgccgcctccggtttgcgccttttcgggctgttacacgcgttcggtataatcaggcatgacggaaaccacatggcggtttctgatataaaatacacggtcatgcgtctcttcaatggcgatgtgatccggagtggcatcaatcagccgtcctctgacaatgcgtctgacggtttgaatgataaaccttgagccgataagcttatggatggtctgataaacgtaaggatccactaacgagacgatttgcgggcttccttgatgggccattttcgctgatcccctttactatgttttccttcagcatatgcagcggacaaaggctttgacacagtacgtctatcggagcggaaaaggtgttagtgagcatgcggagttatgtaagcggaaaaggccgcatgagtggcctagactgagcttcttatgggatattgggctcggtcaattaactgatcaagcttttggatttgtttgagcgcggccgtgtgatccatttggcggtaatggtgatgtccgccgggttcttcatcgagttcatccgcttgtttcacgatttgctggagcgtattcttgtccagttcgccttcaggcagataggaatcggtgtgaagcagaatcgccagcgcaatgtccttcgccgctttcggttcttcaccgagccggatgagcagcttatgcgcccgttccgcgcctttaatggcatggatatcatttcttctgtacttttcataatcccatttgccgtctgtgtaccattcataatggccgacgtcatgcagtaatgccgctttcgccgccagatccgggctgacacctgcttttacggcaagacggtatgcatgaaacgcgcaggcgatcgcatgggcgacaccggaacgctgtaaatacttttgtgcgattggatgggtgaagacatccattaacgttacatttctcatggaaacccctccttcatatatttttagaatcctaacataaatcgagaagaaactcaattcatctgatacatttcttataccccttatatgttgtttcattcatcatatgccgccggacccctaagtgattgtacaaacaaaaaaagagcagcgtgaaagctgctctacaaaaattctttgatatcgtatatccgtccgttttccggctcgcccgcgatcagtgagtgaatgacgccggcgatgtattcaggacttctgaggtttttcgtttctttcagattgcggaaccgttcgatgtcatggaaatcttcttttgacgaagaacggatgaccgactgcatgtctgtatccatcactcccggcgagaatgatatcatgcggaccggcagctcttcatcttcctgttcaaacccgaatgttctcgtaaacatatcaagccccgcttttgagctgcaatacgcgctccagcctttataaggatttttcgccgcgcccgatgtgatgttgacaattgttttgctgccgctgaacgcttcgaagcgctttgtgaacatttggctgagcaaaacgggcgccgtcaggttaagggtgtaatggcggttcaattcttcggcggaagcctctttcgcccgcttgatcggttccaccattccggcattgttgatcagtgtgacggcggagtaccccttctcctctgcttgatcaagaatcgccttcatctgccgcccggtatctgcgagatcggttaaatcaacactgtattctgtcagcccctcgcgcttttccccgcttatcgttcttgaaagcgcggcgacttcggctccttcttgaagcgcctgttccgtaagcgcccggcccaagccttttgacgcgcctgttataagaaaaaactgcatgaaactcctcctttttttcttattttacgggctgtcttcccgcaaacacaagcgatccgttttaccgctttgccttttcctgcgccgtgactttcgggatcagatagatcattgccgcaatcccgaggaggatcaagacggcataaatagcgggaagcagataagaagtctttttctcttccgtttccatatctgccgaggtatgccgcaccgccggctcggcaaatgtgatacccagttgtttcgattgcgctttgatcgtattcggctccgtgtctgacgatgtaaacaaatttgatatcagtttgtcatccgggttttcggccggctgatcaaacgtgatatccttctgttctttcggaagcgccgttttttcctcggagtaggcatcgtcgtgcaggtagtccgtacgaatttcaatgtctttcttttcatattcattcggcttgacatcagtattttcctcattcgcggctgcggcttggggaaggaaaaggaaaaaggagagagcaaacagcagcaatcctttttccatgaacgtgttacgcctcataagactgatcactttcctccgttttttccgcaaacagccgaatgacgagcggaagcgccgccgcaatcagcgtaatgatcgcaagaaccgttacccccaacgcaaacagatggcccgttccgtattgaatatcgatatagactttcgaaaccggactgtcaaaggtgaagttcggcataatcaggtcgatcaaaggcgccacataaaagagaatgagcgctgatgatgcgatccatccggtaattgagctgaagacaaaggctgcccggataaaagctgaactcgccgcaagcaggagaatcgtaaagactgaccatttaatcgtctgatcatccggaagcgaatagatattcagaccgaacagactgatcatcaatccgaccataatgtttaaaatcccaaagagcgcgcctttgacaagaagcggcgcctgctgataatacgagctgaaatagccgatcagaagactgctgatcaggacgatcaccaaaatgacgaccggcggaacattctgaacccggtcttccggcacctctccgctgattttaagcggattggcgagataatcataaacatatccgttttcctgtccgtcaacgagcgcgttccctaaaatgccgtacacgtcatttctgatcaatttcgtggaatcgacgtttttgccccagttgctgttcagggtgtccgctttttgctggacgtcatttacgctttgctgcatattgtcggtatagctgatgatgccggactggcgttctgacagatggcccatcgtgtcagacatttgcaggacttcacggccgacggtatcctgagcgccgagcgccatcgttccggttaatccgtctccgctgaacgcggccgcttcctgcacagcgccttcagccagctgatcggatgctttcgccgcgctgtctgaaatgctggcaagctcatcgagcaccccggcttgctcatctctgatatacgagctgtagttatccgagaattcggtcatgcctttaatgaaattgctgatgtcttcatcagtctgcattttgttgtttttcagattttcccagcttgccgtttcttccggtttgatggcaagaacggtttggacttcaccttgctgggctttcagcacccggtttttcacatcaggcagcgagcccgcgtcaagagagtgatagagtgtcgcctcatacagggataaatcattatagtaactcattaaatcggatatcttttttgtattgatgtcagcggcaaacatctgttcaagagcagatttgcggccgctatccaatgacgggtagttcagaatgttctgttctgttcttacaatcattctgtaaacggtatcgaagtcttgttttctcgtttcttccaattcttccaaattttcctttaatttatctgcccgtttttcaactttggcaatctgatttttaaggccttggatttcttcatcaagagcatcgagacgttttttcagttctttattatgagtctgctgtttctcttccagctctttttcaatttgctgaatgcgttctgcggcttggttcagcctttcttttgcctcagatatgtccgtgccgccgtccctttcagaatcgtttggatcgtccgccggctcatcagcaggcggagtgacgttttcagcggctgtcgaggtctggacggtttttggctcctgatcgcctgtgttatcggaggcaggctgctcttcttttgtgccgtcttccgtttttccgtcttctccgggagccgttccgttattcggatcggtatcgccggagttttcaccgtcatcgccttggcccggttcttccggttccggtttttctttttccggttcttttaatccgtcagaaatgtgattgatttcagcggagatgcgttttaattcgtcacgctgatcgtcaaggtcaattttcagatcgccgggtttttcttcttccggtttttcttcttctttcggttcatccgagccgtcatcacccgggtccttttccggaacggttaatgccggccgatcccttttcataagggtttgaatgctgttcaatgtttcaaatcttgcttgcgctttatattgagtcaaataattgtccagtaaattggattgaatattcgccatcccgcgttcctgatcaggaacctgcgcttctctcacctgttgggcggcaaaaagagccgatcccgtctggtcaagctgtgtctgcgcccggtttatgcctgaagagagcccgctcatcatcgtgctgaactggttggcggcctgctgtgctttaatggcgttcagtccggttgtgatttgcttttgattttgttcctgcgcggccatcagcagttttttctgattttcttgatattgtttgtagcgctcgaccgtgtcggcaaagtctttgagcgtggttttggcttcatctgccgaagtcagtttttcttttgccgcgccctgcgcttcattcattgattttttcagttcgtcaatcaggtctttttgccgtttgatttcacctgccaagtcattggagctcggcttgtaaaagttgtacatgacattttgaaactctgattctttattgacgatcttgtcaaaatcgcctcggacattgttcactttttgtgagacgaaattccaatataatgccgacatttttttattcattgatttttgggcgtcttcaagctcacgctgcactttttctttgttgacggcgttcaggttgctttgaatattgaatgtcagcgtggctttttgcggacgctccttgtcatagcttaagatgtcttttgaaaaatcggatggaatgtaaacgacggcgtcatatttcttagccgccagaccgttttctgccgcgctcctgttgacaaccgtccatgaataatccggacggccgccgagagcggccgctacttctttgccgaaatggacggattcctcttcctcattttcatctgtttgtaagcccatatcttcattcacgactgcgatttggcgggtggcgttgattttttgttttcccgggtcatcgccgataaaccggaaaaacagcaccggcagcagcagaatgatgacgaccgcggctattaatttgatcaggctttttcgttgttcggtcatctgacggcctccctttccgctgaacataaaggtatttggattttttgctccttcccgttttcaaccaaatagccgaagcccggctgaatgtccggttcctgcctttggtaaggcagcggaatgacattttgttcggattttttcacaagcagcatcgcgtggcggatctgtttcatttccgtcgttaaggaatcatagccttttgagaattcgctgtgattgcccgccgggataaaactgaagcccacatgcgcgtaagatttcataaacatcgccagcttgtcctgtaaggcggtgtcgatcgtctgctggaatcttgtaatgccgtcggccattaacacgaccggagagaaactgagtttgtgcacatcgccatttttgacggcctgcgtatactgagcttcgcgctccgtgaaaatggcttctgccgtttcgatccactgccggacgtcttcttttgtgtccagatagctgacctttgtttcctgcgcatactgcgacagtccgcggtcaatcgagtcaaacagcccgacccgttccgcaccttcacgcagcaggtgattcagcatcactttcaggatatttgtttttccacgctgtgtctggcccaaaataagacaatgcttatttttacccagatcaaagtacacagggctgaccttttcctcatgaagcccgacaggaatgcggaacgggtcttgttccgggccgagacggagtgaaaattcgccggccgtcagcatatccggaagcatcggaatcgggtctggtccggctgttccggcgtggcgctcagctaaagctttgacatcagctttcagcgcctggaacatctcgaggtcattttccgcttcagccggaagaaacatttgcgcgaaatacagttcttctttttggatcatgacgcggcccgggatcggttcgagactgaacggcggacgcccgtaaatggagtatccttctgactgatccattaaataatggacgactttcgtttttatgttgtttaacagcgactggcggacggcgtttaccctcgttgcggtcagcaggaagtaaatgcctaagctttgcccgtcgcgtgaaatctggataaattccgtttctaattcatgcatttcgtctttgacgatgtcgaaattgtcaattgtgataaatataaacggcagctcttcttcactgagcgaattgtacattttgatatggctgacttctttttccctgaacagccgtttccgccgctcgatttcttccttgatgcggatcatgaatttttcgatctttctcatttgatccattaagaaatagtctgcggtgtgcggaagctttgccaatggcagaagcgtgccgtttccgaagtcaaagatgtacatatgaagctcttccggcgtgtatccttccgcgaaattcatcaggaaggtgatggcagccactgacttgccgtagccggatgagccgaaaatgccgatgttgccgtcatccatcattgtgtaagcgagaggcgcctgtctttgctgatcaggctcatcaacgcaggcgatgaagaagcggtctttttcctgcgcggggtaaagcgtgcgcgggatacgttcggcaagcggcggaagccacgggctcggcagcttttcaatgcccatttcattttgaatccgctcgatttcttcgactacggcttctatttctgccggggcgtcttttttcgccgcatcatccgcatccacctcagacagcggaattaagccggtatcggtaacgatggcaatgtcatcctcggtgccgtatacatcttccatgtaaggggcgccgctccaggcagactgaaactgctcatacacttcgttatttccgacttgcaagtagccgcgtccggtgaccgtaatattcgccgcatcactgtttttcaggatttctttactgtcacttgcatcctgcactttcagcgcgaccttaaagcgtgagttgctccatatttggtcgtcaatgatgccgcccggcttttgcgtggcgagaattaaatgcacaccaaggctccgtccgatgcgggccgcgctgacaagctccctgataaagtcaggctcttcgcttttcagctcggcgaattcatctgaaatcaaaaacaggtgcggcatcggaatatccgtttctccctgtttatacagttttgtatagtcattgatgtgattgacgcgatattgatcaaacagccgctgccgttttttcagctcgctcttaatggatgcaagcgccctgatactgaagtttctgcttccttcaatattcgtgatggtcccgagaaggtgcggcattttgcggaacggctgcgccattcctccgcccttatagtcaatcagcaaaaacgccgcttcatgcgggtgaaagtgaacggccaatgacaggatatatgtttgcagaaattcacttttcccggagccggtcgttcccgccagcaatccgtgcggcccgtgcgctttttcatgcaggtttaaatagacgatgtcgtcttttcctttatagccgatcggaacagccagcgattttgcagactcacttgtctcccacttctgcctgatgccgatttcttttacttccttcgcatgaaacagctcgagaaatgagaccgtttcaggaatggaattcgtcattccgacctgatggtgcaatgtccgaagcgtccgggaaaaccgctcgttgtttgtccgttcatgcctgtccagcttaaacgggatctgcaccgcttttttctgttgaatgagaatgtctccctcatcttcattaatgtagcggacgagggtgtgaatgttttctgccaggctttcctttgtttccgcggcaatgatggccgagatgccgagatgctcatgccggccttcgatgtattctaaaatgacgtgctctgcgatcagctgctgatttgtgatgacaaagacaaaatgcggctgaaagatctttttttctttatcctcttccaaatcccgctcccgcagcagctcgtaaatggacgataacaattgatcgcgggtctgttcattgtaaataaatcctttcgcatacatatgaggcagctgaaattgcggcagccacttcatccattcccattccttatattcgtcctcatgaaagataaagacaaatcgcaggtcatggtagctgttgaagaacgcgagctggccgatcagctggtgaatttcatttttgacgatctgaggtttcccgacaagccccatcggcccttcttgtaaatcaacggtcacgggcgcatggcggatgtctttatacacacgctgcatgtgctgcgactgctccatcaagtcatccacatcacggttcgccaggtctccgccgctcattgaaatctcgtagcttgacgggaccgtgcccgttccgagccgaagcatcagaaaatccctgctttccagcgatttctcccaaatgcggccgctgatttcagaagttaaatatttcattttttcaaacgggggaaaatgatgcgtcagcacgtgcagctgtttttccgacagcgtctgaagctctttccgtttgctttctaaatactgcttgtacacacgctcccgtttttcctcccgttttttccgctggtttttttcacggaaatactgcacggtggacgtaatgagagtcatcataaacatcgccaaagagacaaggatgaatatgcccctcggctgtataatagcgacaacccccattacaatcagcatgaccacaggaggcagaatgacgagccacagcccccggttattctgttcgctttcctgcgagggaaagctgaatgaaacgcggtcttcgggaagatcgtagaccatgcgcggcgttcttcgatattgcgggtatttctttttcatttcggtgcttggttttaccgttttggttaaaccggcttgaagcttttcgtgatgaacgatttctaaaaggtcgtcctccgtcagcctcacacgcagaaaattccacagcagctcatctcccgtccggagcctttcgggagcttctgcaagctttccgttcacataaacttcctgaccatcagggacgacagaccagcatcctcccgacttacgcagataaaaagcccctgtttgagcggaggacggctctttgtatatatccgcttcctctgtttctgatgagaaaacgatctcatccttcccgccgataaagtacacggaggattcttcctggtcaggggtgagcagaagccgcatcgtctcttcttcaatccggcagggcatttcatttcctattgtcaattcgccggcacagttatttcccaggaaaacatcataacgatctgtttctttccgataaagggttgcggcgttttgccgtaacggaagtgtgccgaccgtgattgtatctttcatatccggaccgatcgtaatcggctgagagggcgggagttcagacagctgaaccttttgtacgtgctctcggtaaaagacccataacagactcatatggcgaacctcctgacgacagcctgatcgttacatgcggccatttgatgtgtgctgttattttttttcatcttttttctcatctttcttgtcgttctctttgttatctttcgctttgtcttgtttgctttcatcttgtccggcggaagcttcggcggtgtcactgttttcctccgcttctttatgctgttcctccgcctcttttttcgccttcgcaagctcgctttccacggcgtccagttctttctgcttttcgtcgtctttcatactgtcatccgctaataattgctgtttatattttgtaagtccgagccagatgtacgggttgtactcaagattgcggccgattttgatggcttcttcattttcccctctgccgatatcaatccaataaaggaagtgcttcgggtctgattgcagcgtgaccagattcccgatgtttttccgctgttcttccctcagattttcaactgccacataagaggaagcaagctcgtactgcacagattccgggaggctttccgcatcgtatttagcgagtgtgtcaatgactttgctgtactgctgatttaaaaaatagcggttgctttccgtaattgcctcttgcttcggctggacgaaaaacagaacgtataaggagtaaagaagtgccggcacaaggaggacggcaagcgccagaccggcgtatctttggattttccatttctttttcggcagttttatgtatgtcttgtccctttcttcgagggaatcgattgcggtttgaatggcttcttccagttcttcaatcgtctccgcctctaacacgcttttcacctcaggagagaaatgaagcgtctccttgtacttcaaatattcatcgaaggtgtacgccccgtcagctgcaagcgccgcacaggctttgagctcttttaacaccctttctctatcttcctcataaggcggaaggctctcctttacgccgtaatgaagaaagtaaggcgtcagcgctttatcaaacacgatattttcaggggcggcaatcagattgagacgtttcagcttatgctgtttcacggcttggacgagacggtaggcaaattgccacctgctttttttatcttttccttttatatagcggaaagcctgataagaagaaggaggtttgattgtgatggttacttcgtcttctgaaactgagacctctttttgaaaaaaaggatcggcatctttaatcacattcgcttccagcccgtcaagaagcttgattttttcccgctggaaggtgaacgtgaagcctgattcggtttcttcccggacggcgtctaattctgtttctaaataagatctgttatgacctgtcattccaccatgtcctttcataaaatttcaaggcggtctccgttcgtaatgccgcagtcagatagcttttgttctccggaaaaaaccgtttctttattgaccactctgatccaatagccttcacgcggcggaacggatacatgctgagcctgccgggcaatatcaatgacttttttcacagaatggtaatctgacaatctgagatcgaagacgctgccgttataatgtgttaaatctattgtaatatcgatatacatattcatatcacccttacatagaaagagcgccgtcttcttgattgaatcaggcgctccgtttcttcattcatcttattatccgcgaatttggttagcgatatcttggtcggtagactcaagcgtatttgccgtttgatcgagctgatgattcacatcttgaagcaattcagacattttaataaatgaaggtttcagctgctcatattgatccgcgaatgcttcacttgaagcaccttcccacatgcctttcaaatcagaaatcatgcggttcaggcggtcaacctgattcatgacttcctgactttcaacgccatattgcttagccatcgctcttagctcttcgggtgtgacacgaattaatccagacatattccttataccctcctgtgtcatcagcctaaatatgggctaattcacttattttttgaacgtcattattataaaaacaaccaatcggcacagtcaaacaaatctgttttaattttacaaaatgagtcttatgatatattggatttttcgtcataattacacattttgtaaataaaatagtatgattttcttattattttcgttttcactgaatgatcttattgtcctagtctatttccctgcaaagatgcctttcagtctgaaaagcaagatggtaagatcaagatatgaagctatgaaaaagtagggatacagatgaccaatccaaaagatccatttaagtacagtttcgacaggcttgaagatgttgccgaccatatcagtgaagttcttcaatgccccattacaatagaagacgttaatcataaactgcttgcatacagcacgcacagcgattgtacagatcctgcccggacgtcgacgattatcgggcggagggtgccggaaaaagtcatcaacaaactgtggaaagacggaaccattccggcccttttaaaaacggaccagccgatcaaagtgaaagaaattgacgaggtgggcctaagcaaccgcgtggcgatttccatctggaaaaacagtcaggttctcggatttatttgggcgcttgagatcaaaaaaaagctcaatgacgaagatctgaagacacttcagctggcagccaaagcggtgcggaacaagcttttgcacctgcagatccgcaaaacgaaaatcgaagagcggggccaggagtttttttggaaaatgctgaccggccatatttatcaggaagccgagatggccgaagggtttcataagctcggaatggcgctgccgtccgtgttcagcgtcatgatcatccgtttacatgatgagctgactgaaaagacggaacagcagctgcaatatttgcaggaaacgacacagcagattcatgtcatgctggcgactgttgattcaaatgaattaatcttattagccgcgccgaaaaccgatcagccttttaaagatttaaagcacttcgctcttcatattcaaaaacagttgaaggaacgatataaaattgaggatgcgtcgattgcgatcggcggtatttacgaatcgatttcttacgtttaccgatcctatcaggaagcgctttccgtattaaaagcgaaagagcggtttgtgagagaaaccaaacaccttttcagcttttctgaactcggcatttatcagtaccttgatgtgttggatgaaaaacgcaagcacagcggctatatgaactattccctgtcaaagcttgagcagtatgacagggagcaccaagccgatatggtaaaaacgctcgaacattttattgatgccgacagcaatgtcaacaccgccgctaaagcgcttaacatccatgtcaatacattgaattacaggctgaaaagaatcagccagatcgcagaaatcgacttaaaaaatgtgaatgagaagtttacgatttacctggatatcaaacttcgcagcatgggttcgtgaaatttcacaaatccgtgtttttttattttctgtttcaaacaaagaattttcgcaaaaatcgcgctacacttgaagcatcacacaaacattgggggaaacagacatgattatcggggttccaaaagaaatcaaaaacaatgaaaatcgagtggcattaacacctggaggcgtttcacagcttatcggaaacggccatcgggttcttgtggaatccggagcgggactcggaagcggctttacaaatgaagattatgtatcagcaggggcggaaattctggaggacagaaagcaagtatgggatgcggaaatggtcatgaaggtaaaagaaccgctggctgaagagtatgcgtatttccgtcaaggtctggtcttgttcacttaccttcatttagccgcagagccggaattagctaaagcgcttacagaaaaaggtgtgacagctatcgcgtacgaaacggtaacggacggacgttcccttccgctgcttacgccgatgtccgaagtggccggcagaatggccgcgcagatcggggcacagtttcttgaaaaaccaaagggcggaaaaggaattttattagccggcgtaccgggtgtatcccgcggaaaagtcacgatcatcggagggggcggcgtcggaacaaatgccgcgaaaatggctgtcggactcggtgccgatgtgacaatgatcgatttgaacgcagaccgcctgcgtcagcttgatgatattttcgggcatcagattaaaacattgatgtcaaaccctgtaaatattgcagattccgtcgcggaagcggatcttctgatctgcgccgtgctcatcccgggagccaaagcgccgactctcgttacggaagaaatggttaaacaaatgaaaccgggttccgtcattgttgatgttgccatcgatcagggcggcattgtggaaaccgttgatcatattacaacccacgataatccgacttacgaaaaacacggcgtcgttcactacgctgtcgccaatatgccgggcgccgtaccgcgtacgtctacgctcgcattaacgaatgtaaccgttccttacgcgcttcaaatcgccaataaaggcgcggcacaagccattgcagacagccctgcgcttaaagcgggcttaaatacggctaacggacatgtcacgtatgaagcggtagccaaagacttaggctatgactacgtgcctgctgaaaaagcaatgcaaggttcggctgcaaaagcttaatagagatgaagaggacagcctgatcagcgggctgtccttttttctttctcacaaaaggaaaaacggccccctgtctcgaatatcaattcatatcccggaagaaaaaggaggattcatatggctgttcagcactatggtgtattaaaaggcactgtgttagatatgaaaagggaaacagatgatgattctccgcattttcaagtcgaggtgctaggcgagcctgatacgcgctatcgctgtgcgatcaatgtcatgtcaagttcaaaagaatcagaggtgctgtatgcggcacgcgatcattttgacgcaagcgcgatcaccctgctgccgaacattccgtacggatataccccaattgatgaaaccagacgtgagctggcgctggattatgtccgcggcggattgtttgatccccggaacatggtgccccttccgcatgaagtcaccggtccggataatgacttaaatgactttattgagacgtacatgcaaaaagccaaatcagaaaaagccaccgtctatatttacggctctaaattcgggccggagccgggcgctgataagattttcgggttcaagccgacaaacggcatgcataatattcatatgaatcagggaaacccaattgatacacgctggaagaaggataacggaacgtggcacgacggcggtattttaatccagtttgcagaccagtgggccgcggtctttttggcttttctgtctcagtcatggtgcacggatgaagaaggccacccttatacattttgtgatcatacacagcttaacggctgatgtccgcataaaaagcctgccgaaataacggcaggcttttcttattacattttagcagcttcggtccgcttcaggctttccggcctcatatcacgccagtttgtttcaatatattcgagacaaacggggcgggtttcattcgtcaggcgggtttcccagccgtccggcacatccagataggccggccacagtgagtactggccttcagcattgacgagcacatggtatgaaccgtcttcccgttcaaatggatttgtcatatcatctctttcctttctttaccggactgtacgccgtccgtttaatttctctgccagaatcgcgccgatgtcggcaagcgggcccggctggcacatatctttatggcggcagtctaagtcataccgctcgattttcccagtaatatacggtttccaagtatccggctcgatcgggtcaaaccactccggaataatcgtggatctgaagaacagcacatctccgtggaacggctttggcttgtatgttcctaacagcccgacagaatttacgtacgtgtctttcagattcatcatcactgactcgtccaggctggctaatgcgcttccctcacggcggagaatggtcagcgcggtgtcaaaatcaagcggctgatccccgaggctgtccgggtcgtaccctcccagggcaagcagcgcaatgacggcttcctcgtcatcaggcgcattttttatcggcagaaaatgattcggatacgcgtcaagcatcaccaaaagcgaaacctcttcgccccggctctgtaattgtgtcgccatggcctgaatgacattccctccgagagaccagccgagcagacggtacggccctttcggctgcacggtgcggattttttcaatataatcagccgccatgtcatctaagctttgcggaagcggttctttttttccgatgcctctcgcctgtaagccgtatatcggataatcagcttctaaagaagacatcagcccggcataacaccagctgagaccgccggccggatggacacagaacaacggtgtttcttctcctgccgttctgagcggaagaagaacatcaagcgcgcttgtgcccgttcctgactcaagtctttcagcaaggcttgccaccgtaggagcttcaaatagtgttccgatactgagctcggctcccatcgcttcccgaatacggctcattaaatgaaccgcaagcaaagaatggccgcctaaatcaaaaaatctgtcatcaataccgacacgcggcagatgaagcacctctgcgaacagctcacacagcatttcttcctgcggcgttctcggtccccggccggtgacctccgtttggaagtcaggcgcagggagcgcttttcggtcaagctttccattcggtgtcagcggcagttcattcatttggacaaaagctgatggaatcatgtaatccggcaggctttcttcggcaaaccggcgcatgtcccccgtgtccaaggtgctgccggcagatcggacaaggtaggcggccagccgtttatctcccggccggtcttcacggacgactgcggcggcatcctcgacatccggatgtttgacgagaaccgcttcgatttcccccaattcaatccggaagccgcggattttaatctggtggtccgccctgcccatataatcaagagaaccgtccgtccgcaggcgggctaaatcccccgtccggtacattctcgttcccggcgggccgtacggatcagccacaaagcgttcggcggtcaggctttgccgccctaagtagcctcgtgccacgccccctccggcaacatacatttcgcccgtgatccccggaggcacaggctccagccggtcatcaagcacatatacgttcagatcaggaatgccgcagccgatgaggctgtttgctctcagttcggcaatgtttttgtctaattcaaggtaactgacgtgcaccgtcgtttccgtaatgccgtacatattcacgagcaccggctgattgtccgcgtggcggctgtaccaatcctcaagccggctcagctcaagcgcctcgccgccgaagatgatatatctgagtgcgagctgatgccccagctctttgtgttctttttccgcatgcatcagctggtaaaacgctgacggcgtttggttaagtacggtcactcgctctttcacgagaagatgcagaaacgcttccggggatctgctgatgtcatgcggcacgacgacgagacgtccgccgtggagcagcggcccccatatttcccagacagagaaatcaaaagcgtaggagtgaaacatcgtccatacatcatcagaattaaagtgataccaatgccgcgtcgactcaaacagccggataacattgctgtgcggaatgatgacacctttcggcacacctgttgatcccgacgtgtaaatgacataggccgggtgaagcggtctcagcggacgaatccggtcggcattctcagggttcgtgacggcatattgccgaagtgtttccttattctgcggatcatccaggatgaaggccggcatgccgttttcgccagagagcttacttgcgccttcacggttggtgagcataaatacaggcttggcatcatgtaacataaaagcgatgcggtccgcgggataatcaggatcaagcggcaaatacgctgcccccgtcttcaggacggctaacagcccgacaatcatatctaaagaacgcggcagcgccagtgcgacaaactgctccgggccgacgccgcgggcaatcatcatgtgcgcgagctgattggctcttttattcagctcttgataagtgagtccgctctcttcaaatactgccgccgtttcatccgattttgcggcggcctgtatttcaaacagttcaggcagtgtctgccgaggctgaatatgctgttttgcccgtttaaccggcaaaagcttccggcgctcttcatcagaaagaatggttaagcttccgatcggtttatccggatgtgatacggcatcttcgagcagaagaagcaggcgtccggcaagtgcttcagccgtttcttttctgaataagtccgtactgaactccagcaggccttcaataccggcaggcgtgccgtcatcatggcgctgttcagccaattccaatgtcaaatcaaatttggacgatccgacactgctgatttgcaggcttgtttccatatcaggaagactgagtacagggtcaggcgtattttggaatgcgagcatcacttggaacagcggatgtcttgaccgggagcgaaccggattcaattcttccacgagacgttcaaacggcacgtcctgatgttcatatgctgcgagattcatttccctgaccctttcaagaagctcacaaaagctcggatcgccagaggtatcggttctcagtacgagtgtattaatgaacatacccacaaggtctcctaatgcgtcatcactgcggccggctatcggactgccgatcggaatatcggttcccgccccgagccgggtcagcagtgcggaaagccctgattgaagcaccataaacaggcttacgcgctgatttctggcaagtgagagaagacgggcatgaagctcttggccgatgttgaccggaatgacgccgcccctgtagcttgattcagcgggacgcggaaaatcagacggcagctccagctgatccggtacattttcaagcgttttcttccagaaatccagctggcgcgcaattaagctctcagaatcagacgcgctgcctaaaagctgctgctgccaaagcgcataatccgcatattgaaccgccagcggcgcccattctgctttttcacctgtttgccgggcgatataggctatggataagtcacgcatgagcggattcaaggaccagccgtcgcctgcgatgtgatgcaggagaaccatcagcgtatattcgccgtcaccaagatcaaacagctcagcccggacggccggctctttagcgagatcaaaccgatatcttgccgcagcggcaagcatgtcttggagctcgtttttgtctgcacgtgtcactgtaaacacagggcgggcttcttcagcaggtaaaataagctgatgagatgatcccttattttccggaaaaacggtgcgcaggctttcatgacggctgacaacatcgtaaaaggcgtgtttcagcgctgattggtcaagcttgcctgacatgcggacaatcaccggaatgttgtaagtcgggctcggcccttcaagacagtagagaaaccaaagacgcagctgcgcaaatgacagcgggatgtgctccggccggtcaaacggcttgagcttaggccgcgcactctttgcggtgtcaagctgtgcggcgagcccggcaacggtcggggtatcaaacagacgtccgatgccaagctctgcgcccatcgtctcccggatccggctcatcaggcgtccggctaagagcgaatgtccgcccaattcaaagaacccgtcatcaattccgacccgcgcgagaccgagaacctcggcaaacagatcgcataatatttcttcctgcggcgtccgcggccctctgtcagacaggacagctgaaaaatcaggtgcaggcagagcgctgcgatcgagcttcttattcggcgtcagcggcaattctttcagctgtacaaacgcgcccggcaccatataatccggcaggctttcgcccatatattcacgaagtccgccgatatcaaggggctgatccgcgacagcataagccgccaggcgcttatctcccggctggtcttcacggacaataacagcggcctgcgaaatacccgggtatttcgacagcactgactcaatttctcctaattctatccggaacccgcggattttaatttggtgatcggctctgctgatataatcaagcgagccgtcctcacgccagcgcacgagatctcccgtccggtacatcctcgcgcccgcgggcccgtacggatcggcaataaatctttcagctgttaaatcaggacggttataataacctctggcaagcccctcgcccgctatataaagctcgcccgcaattcccggcgggactggctgcaatgcggcgtccagcacgtatacccgcgtgttccaaatcggctttccgatcggaggcgcccctgtatggtcttttgcaagcggctgtgcggccgaccagattgttgtttcagtcggcccgtacagattcgtcaccgtacagcctgattcaagcagagcatgcataagcgcgttcggaagcgcctcacctccgacaagcacctgcagcgcccggagggaatcaggttcattggtgactaatgaatgccacaatgtcggcgttgcctgcatgattgaaataccgtatgagtgaatcatgttcgcaagcgcccgcggttcctgaatcgtctctttacgtgcgatgacgcaccccgccccgctgatgagcggaaggaagagctcaagtccggaaatatcaaacgccgcagtcgtaacggcaagcaggcggtcttgtgcgccgagcgggaacatttcccgcatggataagaggaaattgcttacgctttttaatgtcacgactacgcctttcggtttgcccgttgaacccgatgtatatatgacataagcggggtgcaaaggcgaacattccgcctgatcggaacagtcagcattttgagcggcaacggtttttaccgtatccgggtcatcgagaatgatcctttttgcatcactgtcttccggcatgcggccggataattccatcgttgtaatcaggcatgcagggtgtgcatctttgagcatgtatgtgatccgctcagaaggaaaatcaggatcaagcggcaggtatgcggctcccgttttcaaaacggccagcatgctcacggccaactcctgtgaccgcggaagcagcaaagcggcaaattgttccggtccgagccccttttcctttagcatgccggcaagctggttcgcgcgcttgttcaattcggcatagctgagctcttcgttttcggtgatgattgccggccggtccggtgtttttacggcctgttcgtaaaacagctccggcagacttttctgcttctcggccttgcgcgtgtcattccagctttccagtacgcagagacgttcactttcaggcagaaggttgagtgtgccgattttttgtgtctggtctttcacagcggattccagcagaagcaggaatcgtttttgatggttttcaatatcttcggcgctgtacacttccggattcgcatcaaagtccacacgcattccgcttccgtccgctctgtcgtaaacgttaattgacaaatcatcaacgggcccggctgataagttatggacggtgcctggcgctcctgcgaaatcaagagcgtagtcaaacggcatcacattgacttgcgggccgaacagcctgcggttttctccgagcaatttaagatcgcggcgcatgtcttcatggcggtatttctgatggcgccggatgtttcggatttcttttgccacttggctgacggcctcatgaaaattcatatccgggcggagagaaagccgtaaaggcagaagattcatgaccatactcggaatattcagtgaaatcgagccgatccgtcccatcatcggtaaaccgagcacgatatcccctgcgtttgtcatccggtggacatataccgccgctgcagctgtgacggcttcatgccagttcggaattgcttttacatgctgcaaagccgtttcagaaagataagccgtgcttctccgaaagcttgttgacgttctcggcgctctttctgccaaactgacgacatcaggttcatccgcaaatttctccatccaaaattcccgatctttcaggaattgatcagacgcgcggtattcttgatcttcttttaccagttcctccaaagagccgaaggagcgcccgttatccggacgtccttcccgtattgcggtgtatatttgcgccgtacgccgtgccagcagtgaaaaaccgtagccgtctatcgcaatgtggtgaatgcgctgataccagaaaaagcgttccggtcccgcctgaaataaaatgtcgcggaacaaaggcccggccgccatatcaacgggctcagccaaatctgtctgcatgagtctgagtgcggcctgcttcggatcagcttctgaactcacatctatgacatcgatcgcagcttcaaatggaggattgatgatctgcttcggcccgtctgctccctcttcgaagcgggcgtgtaatgacacggcttccgtcagcacacgttcgagagctgttttaaatatgttcacatcgatcgcgccgtttatctcaacatactcgcctgtattgtaaatcgcattatcaggatcaagctgctgcgcaaaccagataccggcctgtgcgcctgtcagaggcagctgttgtgtatcatgcattctattctctccctttataaataatctgcgttcggcaagactttttgagatcgggaagaaagaagtctccaccactcttcaagcgtcgggttctccgccagttcaacaaacgtcacttcagctccgtcacggcgccattgttcgacaaggctcatgattctgacggaatcaaggcctctgtccagcaggtcttcatgatccggaatatcagacggtgattcttgaagaatcgccgcaatttgttcccgcacccggtcttttgtcaatacggcggaagtcttcccttctccttcagaaaccggcgcgccgcccagcagctccagcacttcgtttgtcaaagccgtgtaagcgcagcgctgagacgcatattcgatggccatcttatgtttttctgaagaaaaatcagcaacggcgtctccgataaagaagctttggatatcatccataaatgcttcacaggctgtgacgagacagccgatgtgtgcataaattcccgtaatcatgagctggtctctgccgctttcacgcatgatgtcaaggagattcgtccgtttaaacgcgctgtatctccactttgtgaggacaatgtcctgatcatccggggcaagctccggaatgaccttttcttcataaggcccgcttttcagccccggtccccaaaaatccgtcagcagcgcgcggtccgccgggtcttggctgcccggctgcgcggtgtacaccaccggaatgccgagcgctttgcattgctcttttattttcttgatattctgagccgcctccgtgatcggagccttccctttctcaaaagcatcgacgaaataattctgcatgtcatggatcagaagcaccgcgcgtttcgggttcagcgtccacgatactttattttcaggcatatctgacgctgtcggcagcgcatatgcgggaattgacggtatagccaatgtaaacacttccttttttaagattgtttgatttcagcaggcttcaatttttgggcgatcgtttcgcgaaggtcctttttgctgaccttgccgacgccggttttcgggaaagaagcgataaattcaacccggtcgggaattttatatgccgccagcccgcgctcccgtaaaaacgctttcagctctcccggtttcggcgcttctcctttcggaatgacgaacacacaggaccgctctccgagaaaatcatccggcattgaaaccatggccgcatcatgaacggcaggatgggccagaaggtgattttccacctcttcagcggcaatcttttcgccgccccgattgatttgatctttcgcacgtccttcaacgatgatatagccgtccgccgtcagtttgacgatatcgccggtctgataaaatccgtcggctgtgaatgatctttcattatgttcaggcgctttataatacccgcgaatcgtgtaagggccgcgtgtaaacaaatgtcccgcttctccgggggcgacatcccgcccgtcatcgtctaaaacccttacctcatcaaaaggtgacatcggtctgccttgcgtattgacaatgatctcttcaggatcatccagtctcgtataattcaccaatccttccgccattccgaaaacctgctgaagggtgcatccgaaagcgctctttacgcggcgggccgcctcagcactgaatttggcgcctcccacctgcagcacttgaaggcttgataaatcatcacttcgcgaaccggatgcgtccatccacaccatcgcaagcggcgggacgagcgctgtaatcgtgacacgttctttttcaattaacgggaagcagtcatccggactcggcgtcggtgacagaacaacacggcctccggcatataaagttcccagcacacccggcgagctgagcggataattatgcgctgtcggcagagcggccaaataaacgctgtgatgatccaagccgcatatttccgcgctgaggcgcaaactgtatatgtaatcgtcgtgtgttcgcggaatcagcttggacagccccgtactgcctcctgaaagctgtaaaaaagcgacttccgccgggcttacctcttccagctgaacaggctctctatgcaggctgctcagttcctgaaactcttcagcttcgccggccacaatgacatgcgccaaatccggaagtttgtctttcacctgtctggcaagcgccctgtaatcaaaacctgaatgcgtatcaggaatgatgtatgctttcgcctctgcaaactcgcagaaatacgtaatctcactgcttctatgagaaggcagcgcgaaaacgggcagtgctccgagtcggaacagcgcgaaaatcacttcaaaaaactcagcgatattcggcagctgaacgacaacgcggtcttccttttgaattccgagcttatgcagccccgccgctaaacgatcggccctttcatctaattctttgtaggtccaatgtacatctttacacgtcacggcagtttgatttccgtataaagccgcgcgctctttcagcattcctccgaacgtctcacccttccagcagccgtcttttcggtatttttcagcccattcttccggccatggcgtaaatccagtcagcacgatccgttccctccttttttacaactcatcttggtaaagccccatcgcccggagcatggtgcggaatttcgccgatgtctcgtccagttcatcctgcggctttgatccggcgacaatcccggcacccgcaaagagccggagagaccttgtttccgcttcggcgcagcgaagtgcgataatccattctccgtcaccttcagcatcacaccagcccgccattcccgtgtagaaattgcggtcaaacggctctatatcctgaatcgcttctctcgccgcatccgtcggcgttccgcatacagcgggcgtcggatgaagagcgatggccagctcaagcgatgtcgttgacggatcactaagctctccctttacctcggtggacaggtgccacatcgcctcagttttaatgagtgacggtttttccggcacatcaagcacacggcagaacggttttagggcggcggccacggcggccacgactacggcatgttcatgcagatcttttgctgattgcagcagttcttccgctcttctctgatcctcggcgggatctgtgctgcgaggtctggaacctgccagcggattggacagaatcgatgttccgtttttggacagcagcagttcaggacttgcgccgaaaagcgtttttcttgtttctgacgttcccgtcacatccgaagcgaatgtatagccgcgcgggttgtgctgcgccaaatgcttgacggcctgaggaatgtcgatatccttttcagcggtcagatgaagcgtccttgacagcacgattttgctgagcgggccgtccgtaatgttgaatacgccttgttccacaccgctcataaagccctcaggctccggaacgggacggatgtcatatgtattggattgcggcttttctgcggaagattccgcaaacgaaagcgggcctgccgtatggacattcttcggtacaaaaagccgggaagcttttctgccgtcaaaaggaatggcgccggccgcaatcggatgtttgatgccggcttgctttgcctcaagaagcgtctgtcttacgcgttcaggcagtgaatccagctgattctccgcgtctgcatccggcacttttgcaaacacaccttctgcaaggagcgtccttttcggggaagctaaaaagaacgctccgggcttgtaagcgtccagcacctcttttgcagacacttccgtcaatacatgttgatttgtcatgtttgtccctccttctcgttaaatcaaacgcctaaagtagcgccgccatccacgcataaatcatgcatcgtgatatggcttgcctgttcagaggccagaaacaaaacggcatttgcaatatcagaaggctttgccagcttttgaagcggaattcccgttttatatgtatcaagcgaacctctgataacgtcctgtgctccgttttcatcccgccacagcgcccgctgcatgtcggtttccgttgaacccggagatacgatgttgcagcggatatgatgggccgcaagctccagtccgaggcatttcgtaaacatggcggcagccgcttttgacgccgcataagccgccatggaagcacgcggaacgccggctgcattcgaaccgaccgtaacgatggcgcctttttgacgctcaatcatgtaccggcttacagcccgcgatacatgaaatacgccggtcgtattaacagaaaatgtttgatcccaatcttcatcactaagggattgcaccggacccggccgcagcacgcccgcaacgttcgccaatatttcaataggccccatgtcacgttcaacggcagcgatgatatcattgacagccgcactgtcagatacatctgcggcaaacccctgcgcctgcacgcctttttgccgaagtctgtcagttagcccgggaagcaggtcttcatttgtatctatagctgccacatttacgccttgttcagcaagggcaagcgctgttgcttctccgatgccttgagcggcgccggtgacaacggccgttttccctttcattcccaatgcgtccatattatcattccctttctatattgataatgattatcattatcaattatgattcaagacaatcatatccaaatcaaaacacgcagtcaattagaaaattagaatcagccgcatttagttcgaagggcctgttttttctcatgtgggagaatacggggtatgcggccctcccggattcaggcagaaacgcagggctctgctgattaaaacgggcaggacagaaatatggccctctccttcaaactcgctgtattcagcacggactccatcatcttcaaatccggataataaagagtacagcgcctctgcgtgctgcgggattctgcttttatgtgttttttcaatttctcccgcagccagcaatacactgacttgaagattttccgcagagagccggtctgacaaacgttctgcgttttcctgaataaaacgcttgttccaatgaattgacggacttcccgcaacataggtctggaacatgtccggcctcgtcaaaagcacttgcagcacaaaaagaccgcccagcgaatggccgaaaatcgtctgcctgtctctgtcgatcggataatcccgctccatcgcgggctttacttcttcttctataaactccagaaacgcttccgcccctccctgttcgggccatgccgcgccgcgcggatgcaccggcagttctgattcagaaagcggcatcgtaaaatcactgtgccgttcggcggaaaacggctgatctgtcgggtagccgattccgacaatcaccgccggaacaacgcctgttttttcaggccgccggctttgcacccgcaaagcttcggccattgtaccgaacacggaatttgcatcaagcaggtagatgacggggaagccggaggcaggcggttcttcctgaggaaaagagacaaagatacgatacgtacggcctccttttgagcgcatttctcttacttctgtgcccggaaccgcgtatcggccggccggcgcgaacccccggtttatttgttttccgtccattatgtgttcatcccctttgtggcaattactttatctatcctcattgataatgattttcaatatcaaaagacacctcaaataataggttttttgccaaacaaagtcaatggatttttgatataaaaaaagcaccttattttaataaggtacctaagaactatatagggataggggcttaatcccatgtaaagcgctcattcttccatggatctcccctcatatggtagccgtttttctcccaaaagccggggtggttttcctttgtaaactgaatgccgcgcagccattttgcgcttttccagaaataaagatgggggaaaacgcctctgagcggatagccgtgctctggcgttaacggctcgccgttatgcgcatatgccagcagggatgtttcccgcgtaaaatcagaaagcggcaggttggccgtccagccctcttcagcgtgcagaatgacgaatcccgcttctttgtgcacacccgctttctcagcgatgtctttggcgcgtattccctgccagatattatcaagacgggaccagcccgtgacgcaatgaatatcatttttcacttcggcttccggaaaggctttgatatctttaaagcttaacagcataggacggtcaacaagcccgtacacttgcagattccattttgacatatcttcataataaggaacatttccggcgtgaagcacgggaaacttcgttgtgacattttgatttggcggaatccgttccgactgttttgtttgtttcgttttcccgaaaaacatatggctccctccatttagtaaacctgtattaaatctttgttgacaatcaatcacccttcgattacgctaatctggtacaagtgtaagggggaaaaacaaatgacacaacgcaaccttcgcgcgggcgatatggcgctgatcggcatgtttgccgccctgatggccgtcggcgccaacattacatcaatggctccttttttgcaagttgcgggaattccgttatcgctgcagcctttcttttgtctgttagccgcgatgcttctcggcgccagacgggcagccattgcaatgacggtatacgcattggccggactcgcgggggcgcctgttttcgctcaattctcagcaggctttgcgccgtttatcggaaagagcggcgggtttattctcgcttacatcccggcggcatttgcagccggatggctgctggaaaaaacaaaaaaacccggccgcctgcattatgcatgggcctctttgatcggtaccgccgtcatttatatcattggcacgacctatacgtatattgcgctgaaattatggcttcatgctccgatcagctacggaatggcctggttttacatgatatggtttttcataaaagatatcgttttagcactgttattggcatcaatcgcgcctgccgtatacaggtctattcataaagcgacggggttcagcagaaatccggcgtaagatgttctcagcatacaaaaaggctcccctttccgggagcctttttttacaggacaagcgcggcaatccagccgaatatcacaagcggaatgttatagaaaataaatgtcggtacgcacgtatcccaaatgtggtggtgctgtccgtcggcgctgaggcctgacgtcggcccgagcgtactgtcacttgcaggagaacccgcatcaccgaccgcggcggccgctccgattacggcgatcgtcgccatcgggctgaatccgagctgagcgcacagcgggacaaatatggtcgtaatgacgggtacggttgcaaatgatgatccgattcccatcgtgattaataaaccgaccaccagcatcaggagcgcgcctaatgattgactgtgaccgataaagcctgttgatgctttgaccaaggaagccacatcgcccgttttgttcaatacatttgaaaaaccggccgcaacaagcatgacaaacccgataaaagccatcagaatcatgccgtccgtgatcagcttatccgcttcattgcgcttcatgactccgctgataaacagcgtaaacaagccggcaagcgcgcccatgatcataccttccactccgagcacttgtgacagatagagctgaacggcaagcgacacggcaatggagatcagggcgatggcaatgctttttttcgtataaggagaagacgacagtccggcaatctccttcgtctcatatttcttcggtttccggaagacgatgacggataaaattaaaccgactaccatcccggccgtcgggatgattaaagcatacggaatatcactgagcggcacctttaaaccggctgacgccatattatctctcagcatcccctggaaaatctgtccgaatccgacaggcagaacgatatacggcgcagtcagtccgaatgtcatcacacacgcgatcagcctgcggtctatttcaagttcgttaaatatttttaaaagcggcggaatcaatacaggaataaacgcaatgtgaacgggcaccacgttttgcgagaaacaggatatgattaaaataaccagtacgattaacacttttgacagtgcttttttccgcgaatcttccttttttccgattagtttgacagacgcttccaccattgcatcgggaagccccgtcttcgtcagcgccgcggcaaatgctccgagcagcgcgtagctgaccgcgacggtggcatttccgccgagaccgtccgtaaaagccttcaccgtctctccgaggcctaagccgccggtcagcccgccggcaagcgcgccgatcattaaagctataataatattgacacgcagcaggcttaagacgagcataagcaatactgcgacaacaacagcattcattgatgagtccctccaaaaatcctttagtttgctaatgtagtagataattaaagttaacatacattctgcgctttagtcaactaaagattttggaaatcaaaaaacccgctgcatcaaggcagcgggatgctgttatctttcgggcgtaaaccgctcagtcaaaacagccaacgtccttgccatgacgcctgttgcgccggcagggccgaagcatgtcgctttattcgccgtcgcggttcccgcaatatcgagatgaacccacggcgtgttttccgcgaattcaccaaggaatgcccccgccataatcgcgtggccttctcttcccggagaattgttcaaatcagccatctgactgtttctcacccgttttttatccttttctgtaatcggaagctgccagatcggctcgccggattctttcgccgattccgccacctgttcataaaacgcggcgtgattggtcatggcgcccgtcatttcgttacctaaggcgacaatgacaccgcccgttaacgttgcgacgtctacaaggacagaggctccgtgctgcttggcgtatgtgatgccgtcggcaagcacgagacgcccttccgcatcggtgttcaggatctcaatggtttttccgctgagcgaaacgatgacgtcatccggcttcatagcatcggacgaaatcatgttgtccgtagacggtatgacggcgagcacgttttgttcaggccggagttcgccgataatttccattgcgcccaataccgaggcggcccctcccatatcgcttttcatgccgacgatgccggttttcggcttaattgaatatccgcccgtatcaaaggtaattcctttaccgaccaggccgatgacgtcttcccactgatctttgccctgatacttcagaacgatcattttcggcggttcggatgagcctttgttaacggcaagcagcccgcccatgccgagctcttccatttcatctttttctaaaatttcacactcgaaatcgtattttgccgcaagctcagcggcatatgacgccaaatcagtggccgtcagcatattacccggcatattcacaagcgtgcgggctgaattcgtcccttggccgtatgccgcgccgacgttcaggccggcctgcacttccctcaggtcttcttcggtcacggcgcagactgatttcagttcctgatccggctcattcgatttatgtttataatcctgcacctcataaaccgcaagcagacagctttccgaaagcgcatgagcggcatcggcggcaggcacttccccggagacgaatgtatcgagcaacacggatacttcctgttttttatcttgatgaatctgctgaaatactcgtgcaaagcattctttcgtatcttcaaacgaataatccgcttctcttcccaggccgataaaataaatacgtttcataccggtcgcagccggagggtatacttttgatacacgattgcgtttggcggacacatcaccatcctttaacagctgggtcagatgaccgtctaatttatcatccaattccttcgtaaatccgttcagcgtgcttttttgaaaaagaccgatgaccagtgtttcgggatgccgcagttgatcagatgcataaaacatgagtacacactccttatgtgggtatttgttatgtaaagtggtataatgaaaaaacatttttcattgattttattttaccaaactaagggcgttttctgcagtttttcgatacgatcggaatcagcagatacagaaaggatgtcgcatatggatgtacttatgaattttcctttactggcgagttttgccgccattatttttgcccaagttgtaaaagtgcctattcaatttatcgtatccaaaaaacttgactggtctcttgtgacgagcaccggcggcatgccgagctcccattccgccgccgtcaccgcgctgtcaaccggaatcgctttggaacagggactggactcgcccctgtttgcagtcgccgcgattttcgccgtcattacgatgttcgatgctacaggtgtcaggcggcatgcgggtgaacaggcgacagtcattaataaactggtcatcgactttaatcggtttgtcagcgaagcgaaggactttcagaaagcggaagagaaagaaaaacagaagaaactgaaagaactgctcggccatcagccgattgaagtgttcttcggcggcgtcaccggtattgtgctgacattgattttagattatttctttatgtaaaaacgcttcagcggatgctgaagcgtttttattcttttaccgttttgtattgatttctgaacacttgcagcgactttgtttcgttcagctttacaagttcgtcctcggtcactgtgccgttcccttttttaataatgtagacctcaagtgtttttttgccccaattgttatagacgtccttgacggtgtcaaagtagaggtcaaggcggctgcctttaatttttgagccggtatcggcgacaaccccgtaaccgtaattcggtataaacagaatcgtcccgatcgggaaaacagacggatcggccgcaacagttgaatataaatcgcgtttgaccttcacacctgaatatgtaattccgtactgcggatgacccggagattttccggtagattccgctccggcggtataaccggtggccgtcactttttgtgacggatagcgttcccagtcaaaagcttcttccagcggctttaccctgcctgatgccttcttttccggctgattctgtaaggattgaaacggagtgccgatgtttttcaaaacggcgccgcgatgttccgtcatccaatttgtcagatcctttgcttcaacaccggttatagaaaagtatgtcgcatggcatgcgcccaaaaagagcacgatcatgaatacgcgtctgattatcgtcaatctgaaatcactctcctccgagtcattgttcccaactcggtgaggtgctatacaaaaagcgccgtgacacaaaaaaagctttcttgaataagaaagcggtttaaaacatttgatatcctctttttctgagcgcctttatggcaatgcctgacatgatggctcccgccagtccgcccgccaaaatcacgacatccgcaaccgctaatgacatgatgcgctgaaacaggctttgaaaggattcccccggcgcctgcacgtaactgatcatctttttattgctgataatgaaaaggcatacaatcggatagacaacagccataatccacgacattctaagcagcatgttcaacagaaagcctatgccgaaaaacagtacaaaaaatagtacgattgagatcaggacaaccggcaaactaatcacaaacatccaccccctacagcactttcagtgtacctcgggggcggtaaaaaagtcaacgtctggaaaaatcagcgtctctctttgccgcttccctggcaggagggacatgtttcggagccgccaagaagcaattgaaaataccctttacctgagcagaacggacacgccgccgtgctttttgctgtcgttttcatgcggatcaccctttttcttaattttctgataatatatcatatttacttgtcaagcaccaagtcagaatatgtaacataacaactcatgtaagcggaaacattcttttttttcttttacatgctttttatagcgctcttttttaaaagaagagaaaacccgcggctgcgggttttcagaagaatttaaacttcccttttttcagcgtcaggcccagcccgccgatcataaagagcgagcggttatcaatgacctttttcataaaggacgccggcgtgcctttaagcttcctgccgtatacgactccgacggcgttatgctcaccgagggaggcgaccgttcctttaatgtcaggcttgaactcttcaagctggcctccttttatcaaaccgcccagatttttggcgaccgtttctccttgctgcatcgcgatctgagcagtcggcgggtacggccgttccgtctcttcattgataaagagcgagctgtcgccgagaataaaaacgtcatcatgtcccggcgcccgaagatcagggttgactttgacacggccgcgcatattttcaaaacccgcttcctccacgatcggatgtccgcgcacacccgcggcccagacaacggtctgcgatttgatttcttccggctcttcatctttcttgccgactgtgacaccgtctgcgcggcattcttgaaccgcggtgccgattttaaattcaacgcctttgctctcaaggtattgaacggcgtaatcgacaagctccggatcaaatcccggcaaaaccgtcggggcggcctcgacacagacgatccggacgagactttcatctatatcataatatctgcataactccggcttgcggttcgcaagttcaccgagaaattcaattcccgtaaagcccgctccgccgacaacgatggttaagcggtcagggcgtttttcggcctccgtattgtatgtcgcaaattggagctcaatatggtctttcagctggcgcgacgtattaatattcgcgatcggaaaagcgaattcttttaaacctttaatcccgaatgtttcagggacggcgccaagcccgatgacgagataatcataagggatgtccccttgtgaaagcgtcacctttttattttgcacatctatcgcttttacggtatcctgcacaaatttgacccgtgattcattgattacatcttttatttgatatctgcagcggtcatgatgcagcgttcctgcgctcgcttcatgcatccatgtcgtttcataatgataattgtgtttattgaccaaagtaatgtcggcgtcatttgccccgatatgcttcggaagccttgttactgtcattaatccaccataacctgcacctaaaaccacgattttgggtttattcaatgccatcacatccaccttcttttttttgctgttagacgcataatcaaatcaacatttgtattagcttcagcttattggcgggattttatgaaatgaaatataaaattttttagaaaaccgcacatgtctgcatatcaccatactatccggaagaatcggaaaacattcaggaaaaaacagattggaatttgtccccatcttagcggcggccgcaatttttttcaagaatgaagcggccgggcggttttcggcactcgtcatcctttcaaattgtatgttataattaataacaattttcaattaggaggcaatttggtatgcaagaggattcaaaggtttatgatattacggtcatcggcggcggtccggtcggcctgtttaccgctttttacgggggaatgagacaggcgagcgtcaaaatcatcgagagcctgcctcagcttggcggccagctcagcgcgctgtaccctgaaaaatatatttatgatgtagccggattcccgaaaatccgcgcccaggaacttgtgaacaacttaaaagagcaaatggcaaagttcgatcagaccatctgcttagagcaggccgttgaatctgttgaaaaacaggcggacggtgtgtttaagcttgtcacgaattcagaaacgcattattcaaaaacggtcattatcaccgcgggaaacggcgcatttaagccgagaaagcttgagctggaatcagcggaacaatatgaaggcaaaaacctgcactacttcattgacgacctcaatcaattcgcaggcagacgcgttgccgttctgggcggcggcgattccgctgttgactgggcgctcatgcttgagccgattgccaaagaagtcagcatcatccaccgccgtgataaattccgcgcgcatgagcacagtgtcgaaaacctgcataattctaaagtcaacgtgctgacaccgtttgttcccgctgaacttgtcggtgaagaccggatcgaacagctcgttctcgaagaagtgaaaggcgaccgtaaagaaatcattgaaattgatgacctgatcgtaaactacggctttgtttcttctctcggcccgattaaaaactggggtcttgatatcgagaaaaattccatcgtcgtcaaaagcacgatggaaacgaatattgaaggcttctttgccgccggagatatctgcacatatgaaggcaaagtcaagctgatcgccagcggtttcggcgaagctccgacagccgtgaacaacgcgaaggcttacatggacccgaaagcgcgcgtccagccactgcattctacaagcatgtttgaaaaataatataaaaaagagtctgtgtcataccggcacagactcttttttatttaaacatccaaatataattcatgacggttccgacaacgagcgcaatgacaagcgccgacacgacccaaatcgtgcctaaaataatccggtcctgaattttctgggctttcgggctgtgcccgggctgtttttgttccataccggcccctcccttcttctgcaaatctatctatcgtaacaaatgtcttacaacaaccaatactactatgataaccaaactgcaaatggatgacaagctgaccgcatatgaggcagcatgaaatcatttgacattcctgacaaaacaaagtacattataaaaagacgaacattttaattttatttaaatatattattcgcttttaggggtgttatatatggaaaatgtatttgattacgaagatattcagctgattcctgcaaaatgcattgttgaaagccgatctgaatgtgatacatcagttacgttgggcggacacacgtttaaacttccggtcgtaccggccaacatgcagacgattatagatgaaaacatcgcggcctggctcgcggaaaacgggtatttttatatcatgcaccgcttcgagccggaaaaacgtctggcttttgtccgggatatgaaagcgcgcggactgatttcttccatcagtgtcggcgtgaaggaaaatgactatgaattcatccgggagctgaaagaacaggagctggtgccggattatattaccattgatatcgcgcacggccattccaatgccgtgatcagcatgattgaatttattaaagaacatgtcccggaaagctttgtcattgcagggaatgtcgggacgcctgaagccgtaagggagctggaacgcgcgggcgctgacgcgacaaaagtgggaatcggccccgggaaagtctgcatcacaaaaattaaaaccggcttcggaaccggcgggtggcaattagccgcgcttcgctggtgcgcaaaagcggcgagcaaaccgatcattgctgacggcggcatccgcacgcacggcgatatcgcgaaatccatccgattcggcgcgtctatggtcatgatcggatcattattcgccggccacgaagaatcaccgggacaaacgatcgaaatcgacggaaagctgtacaaagaatatttcggctccgcttctgaatttcaaaaaggcgaaaagaaaaacgtcgagggcaaaaaaatgcatgtcgaacataaagggtctttgcaggacacgctggttgaaatggagcaggatctgcaatcttccatctcttacgccggcggcaatacactcgaagccatccgtaatgtcgactatgtaatcgtaaaaaactctattttcaacggcgacagattttaacatgcagcagagccgctcgaagataaaaaaaatgacattcatattgaatgtcatttttttattaaataccgaaataaagagccgcactggctaacagattaatcacaaaaataaacaaaaagatgtaacgaatgaatttattttgcaccggagcaaatataaagagatatagtcctgccaccccaaaagtaagaacaggaaacagccactcaaaggataaagaaatgatataaccgataatcataacaatcggcacaccgattaatgataatttacttctcatatgatttctgccccttttacttaaaaattggtgtgatgtaagcttcaataacggcagcggcgatcagcagacaaataataagcagcaccaatattccaatatgcctgaacattgaaaccattatctttttttccttagaaaaacacagcctgatgaccaattcaacgcccttaaaaccaatggcgccacttaataataacgcaggaacttcaaatataccatgaggaattagcagtaaaaaaatctgataaaaaggaaccccgctatgcagattttctataatagagccgcttaaaataaacccgttggtgaataaataaaagattgaggtcaacccaaaggtaaaaaaacccgcggctaaaaacagacaagcgattgcattgtttttcagcagttcaaccgcgcctgacgagccgttgtaagacgctgatgaaacaaagtgatcggaaaaaaacgcagcgatcacaccgcctgaaaaaaacagcactgacgcggttaacggaatggcggacgttctgattgccggcaacatgcggttcatcatgtatagatacgctcagccaattcttcaatctcttctaatgaatgctcggatgactgatactccgccgcaaaaacgccttcatgtataataccgatcgtatcgcacagcgaatgcgccagctccagcaggtgagtcgataacaggactgtatttccctgcttgacgtactcctttaataacgtccgtatcgttttaccgctgattaaatcaatgcccgtcagcggctcgtcaagaattaatatctttggctgatgaatgagcgctgccgcaattgataatttttgtttcattccatgtgaataagttttaatcagctgatttccgtcttgagaaagcttcagcgtctccaacatattctttatataatcatttgtccgctgagacggaacttgaaacatttccgctgtaaaacgcaagtattcgactcccgttaagtaatcatataaaaaagcatggtcgggcacaaaaccgatatcagccgatatttgccccccctcttctgaatccagttccttgccgtcaatcatgacgcggcctgaagtcggtttaagcaggcccgaaatgattttcaaagtcgttgttttcccgactccattagtccccagcaaagcatagattgagccttttttcacctcaaacgaaatatctttcaatacctgtttttcactatagtttttttgtatattcactaatttaatcattgttcgcaaacctttccgccatattgattctgcgaagaaacagaaacatgactccatagtttaatagtgtgaacaggacaaaaatacctgatgcagaatgaataagcatcgtttcaagttccggctttttatagataaaataggacgtgatcgcagcgatttgaagcgacacaatgaaaatgaaagaactgtataagttgttatacgtctttgctttccccgcttctccaatttcgtacagatgctcccagtttttcttaggatacagggcggtgcttgaaatctggacgagactgtataaaaaacccgaacataaaaacacaataaacaggtaaatcgtcagcgccgcggaagacggaaaaaacaccgtaatcaaaatggtgatgatgaacgaatagataagagcggcgagattataaatacatactttcggaaacaccagctgccacgcatgtttgatattccggtgaaacagatgctgattttttatttccccgtcaactgataatactgttttgagcgcatctccgacgagctgatacgaaaagttcgcaatgataaccgccgcagacacgatggcggctgccgaatacccgataaagtgatgcgatagaagcggaatacaaaaacctaaaaacagcatgaacaaatacagcatactgccgaagttcctgataaaaaacccgtcaattctcgataaaaacagcagatccttttgaaaaacggcatgaaatattttgttatttctatataatttcagctttggcgcaaaatcagcgtttgtcaaaaacatataaggaataaggtccattttcttcagcgtggccgaccacagtttaaacatccccgccgttaaaaggacggcggccgcaaacaccgcagcgaaaacgagcacggaatgtgagcggaatgctaaccatacatacggcgtattcatgaggatgttccggaaagccggtgactccgtaaagcttgaaatatcctttgcggtatactccccaaacacgagaagataaacggcatacccgactgcaagcggaaccagcaggctgacgctgaataaaatgcctttcaggattttcaagtaaaacaatttgctccatatatttgtaagaagataaacaacataagaaaacagcatagataaaaataaattgagaagaaaataaacgaagcccaagaaaaatacgatgatcgccgcagacccggtcatgcctgcgcttgataaaaacaaaaagaccggaaaaacaaaaagataccatacgaaaatggtttttttgatcgcctggccggcaaaaacagaaaacagctgtaaaaaacgcaccttttttaattgatgaatgaccttgcgcgtatccagcagaaaggcattgtgatgttctttaaagaagccggcagcccaaaaaagctgctcaagtgaaacggcgattaaaacaaattgcccccatgcgctgaggggcagctgaatcagttttgtcccgaatacaacaccgcatcccaggaaaacgagatataaacataacagagaaataataatggcagacagcagtttgctgttgagttgaggaatgccccaatcttcctttctttttcgaaacgatgacagggtattatatttgataagagccgcaatttgtttgactatcatactttcaatccttacatatgtatttgggagagaggctctttttgcagcttgtacaaaaagagcaattatttattggtcgattttaccaagcagctgcgtattttttgccgtatttcttaatcattgtttttgctgttgcaacgattgcataagaaatcgcgcctgcgcctgtaacgataccgatgagagaaatgatagaagcaattgttgatgccgcatcaataatatcaattgcttttttagctgctgctgtagagatgcccagagtcgaagctaattcagcattggctgagaatgcatgagccgccgccacgtttaattcagttcccgttaataatagtgcataaaccaatgttgctgcagcaagagccacgccaaacaaaatgaaagactttttattagattttactaagttcatcataacatctccctactctgtttttttaatttataataaaattcagcttaattgactctctcccgagctaaattttatccgccataaaataattaaagaaaatagtaaagagttttaataaaacaaaacatccagtcaaaatgattctcttgcctttactgagatcggtcagttttcctgcggcagcataaagagccgcaattgatatgagcagaaatggatccagcagctgcagactcaagctggtgccgccggcagaatatataagcgaggaatcagccgttaagtagttaacaactgaaagaatcaacattttaaatgccgagattaaagaagtcagtgtatatagaagcaaatatatttttttcggtttttttgtaccgagaataaaagcggcaacgaataatagaaatccgcctatcagaatttccacaaaagttgtgaagatcataaacccttgcagaaacatgacaatcgtacgaacacttttctccccgatatcgtaggtactttctccgacggaagaataatacgactgcagaactttatcggaaatactgaattggaagagtaatgaacagatcaaaatgatgaaaaaagaacttaaaaatatttttttattgctcaattgacctatcatattatcatccttttcttacaaaataaattaactattctatacttttacaatttagtttattcctatcaaaaaatcaatatcctttcgaaaaatatgactttagaacgtgttgactaagagcacatcttccagattttttgattctatataccctttatttttttccgaatttgcaaatagtatgatttgaaccgttgatttgaggatttttgtgaaggccgtcactcctaaacctattgaaaatctgcccatttccttttgtgacatatgtctgaattcatcacattttttttattgacttaaaacatggtttaagtcgtatcatcacccagtgacaaggaaaaaatactgttggaggtctttcgaagacatgttgttcaattcgtgaagcagcagcaaagtgtaatatgacagaatcaacgttacgttattatgaaaaaaagggactgctgccgctgattgaacgtgatgaagccagccggcggttattttcagcagatcaaatgccgctccttgatatcgtgatttgtttaaaaaatacccgcatgaccatcaaaggctttaagcaatatattgattgggtaattgaaggagagagtcctattaaactccggcttgacatgatgaggagacacaagcggtcagtactggatgaaatgtcgtcaatgacaaaggcttatatcaaaagctctgttcaagagacgtaagtttgttgaagtaaaaacaatcggaaaagaggagttaatatgaaactgacgggaaatacaatactgattacaggcggaaatgccggaataggattggctttcgcagaacggtttttaaaagcgggaaataaagtcatcgtgaccggacggcgtaagcacgctcttcaaaaagcaaaggaaacattcccggatcttattacctatgtcagtgatttgagcattccatctgaacgtgtatcactgtttgattgggtgaaagaaaattatccggaagtgaatgtgttagtaaacaacgcggggattcaacatcgttttcatgtgctgaaagcggatgcgaaggacaattgggactattttaataaagaaatcacaacgaacattgaagctcccttccacctgtctatgctgttcgctccgttttttgccggaaaagaagatgcggctgtcattaacgtctcttcgggattggcttttacaccgcttgctattgcaccgatctattcagcaacgaaagcggcgcttcattcatttacaatgagtctgagacatcagctttctgattcatctgtagaagtgattgaagttgcgcctccggcggtaaatacagatttaggcggagcagggctgcatactcaaggagaaccgctggatgaattcgctgatgggatttttaaaggactgaaagagggcaaactagaaatcggttacggttcttcagcggaacggctgcgcatgtcacgggataaagccgatgaacatacggcaaatatgtacaatgcgatgaaacatacaattgaataacctctttgaaaaagcaaaacccgcttctgttgagcgggttttgcttttattaaacagataaacgccttttttaacaatggtgcaagcgccatcgaaaagaaaggcgtcctattttttcatcctgagaatggcgggctgacccttagcactcttccggcgtaccggcgtttttggccgtgcggaaagaagatccgcagccgcaggaagcgatggcattcgggttgtcaatggtgaaaccgccgcccatcatggactgtttgaagtcaatgatcgtgccggtcataatatcaaggctttcgctgtcaaccaaaacggtgatcccgtgctgttcaaacatgctgtctttttcgcctttttcgtgctcaaatcccattccgtaagacaggccgctgcagccgccgccttttacgcccacacggagaaacgcgttttcttcttcatgctctttcatcatatcttttatatgcaaagccgctgcttcagtaatagttactggaacactcataagtagacctccttttttaaaaacggatgctgatatctattataaaccttgaggagcgtatttctcaaacgagctgtttacaaataatagacgccgctgcatacggtttcggcgggtcccgtcatcagcacgtgcccgttgtcctgccaattaatcacaagatcgccccccgctaaatgaacggtgatatcccggtttcgttcggaaacaccgttcaatacggatgcaacagccgccgcacaggcgcccgttccgcaagcctgtgtaatgccggagccgcgttcccatacgcggaaatgaagttcatcggcgctgacggtttccacaaattcgacattgacgccttccggaaatctcgggtctttttcaatgacgggaccgagcgttgtaagaggcgcttgattaatatccgcaaccggaaaaacaatatgggggtttcccattgatacggctgttccggaaagctccgtttctccaaaaacaaaggtttcatcgatcgtccgttcatcttcattgccgagcatcggcagctcttttttggtgaggcgcggttcgcccatatcgacggcgacttcacgcacaatcccgttttcttccgtaatatctgctttcacaaggcctgaaagcgtctcaatgaaaaaggacgtttcttctgtcagcttatgttcgtatgcatactttgccacacagcgaaggccgttgccgcaatttttcccttctgagccgtcattattaaaaatccgcattttgaccggcgctttttctgacggacagatgaggatcattccgtcagagccgatgcccgtgtgaatgctggacactttaacggcaatctcagccagccgttcttccggcagctgttcttcaaattgatttacatatatataactgtttccaagaccgtgcatcttggtaaaacggaatgaattcatatcggcctccaactttttttcttttacttagtataaaagctcttcccctcggacacaatacaaatatcccccgtttttcatacataaaagctccctgcatatgcagggagcttttatcgtttactaaataaacatgccggcaatcgccgcgctgagaaggtttgcgagtgttcccgcaataaccgctcttaatccgaggcgcgcaatgtccgaacggcggcttggggccaaaccgcccagtgtgccgagcataatcgcaatcgaagagaagttggcaaatccgcacagcgcaaagctgataatcgtagacgtttttttagaaaagtccgcaatatgcggaccgaagtttgaataagcgacaaactcattcagcacaagtttctgtccgatatagcttcccgctccgagcgcctcatgccaaggaacgccgattacaaatgcgatcggtgaaaacacgtaaccgagaatggattctaatgtaatatgtttgaaaccgaaccagccgccgattccgccgagaattccgttcactacggcgatgagcgcgacaaacgcaagaagcatggcgccgacattcagagcaatctgaaggcccgtggatgcgccttttgccgctgcatcaatcacattagcggcgccttcgccttcttcgtccatattaaaatcgccttttatcgtctgcgttttttctgtttcaggtattaacatttttccgaacacgagaccggcgggagccgccataaagctggccgccagcaggtattcaatcggaatgcctaacagggcgtaaccgaaaagcgtcgaacccgctacagccgaaaggccgctcgtcataatcgtaaacagctcggaacgggtcaatcccgcaatcagcggtttaatggcaagcggtgattcagactgtccgacaaaaatattcgcagccgccgcaagcgattccgttctgcttgtcccaagaagttttgacagtccgcctccgatgacgcgaaagatgagctgcatgattttcaagtgatacaaaacggcaatcagcgctgagaaaaagataatgaccggcagaacgctcagcgcgaaagccgggctgctgcccacttttaacagcgggccaaaaataaagctgatgccttcgttcgcataatcaatgagaagctgcacacggcttgagaaccataaaaatacggcccggccggcgtcccactttaatacgatgaatccgaaggccatttgtaaacataaacccacaatgacggttcgcaggttaattttgcttttcttctctgataacaaaaaagcaatggctaatatagcaactgccccgagcagcccccaaacgatattcaatgaatccacctctaaaattttatttaaaaaaagtctttattaagataacaatatttatttttgctgtctacaaattttttattttgccaaaacccgggcgcaataaaaaagagaccccgttcggagcctctgattaaaacatcggattttcttctatgaatgtatatatgttgtcaaccaactcagcaggcgtgccccccgtgaccacttcgccgttaaccagggcgaacagggactccatgcattttccgcagtagcttaaacagccgtactcaagcacgtccaagttcggatccttctctaagatctcaagtgcttcctgggaaccgcgcgctaaattgctgacacagaattcaatcatcggattcatgcggtttcacctcacatatgtaccttatcctaacggaatttcctctattcgtcaaagatccggtttcacgctcaatgttatcgtaacatattaattcaggttaaaggttttactattgcgtgttttctggtcaatttgtaggttattttaaaactattattgtggttttagatcaaattcgatataattctagatgttattttacatagttcgttattttgtaacaatattgactaccatatttttcgggcaaaaggggaatcattatgaaaaaattggtcttgatcggcgggggttacggaaacatgcgggtgctgcaccgcttactgccgaaccagcttccgtcagatgtatccatcacgctgattgacagaaacccgtatcactgcttaaaaacagaatattatgcgctcgcagccggcacgatttctgatcatcatatcagggtgtcttttcctgagcatccgaatctggatgttcaatacggtgaggtggcttccatcgacacgaaaaacaaacaggttctgtttcatgaccgcgaaccgatttcttacgatgacgcggtgatcggactgggctgtgaggataagtatcataacgtgcccggcgcgccggaacatacttacagcattcagaccattgatcagtcacgcgaagcctatcaaaagctgaacaacctcggcgccaatgcatctgtcgctatcgtcggagcgggattaagcggcgtggagcttgccagtgaattaagagagagccgtgacgatctgaagattatgttatttgaccggggcgacctgattttatcaagctttccgaaaagactcagcaagtacgttcagaaatggtttgaagaacacggcgtcaccattatcaataatgcgaatattacaaaagtggaagacggcatcgtttataatcatgatgaaggaataccggccgatgccatcgtgtggacggcgggaattcagccgaataaagccgtcagagaactggacgctgaaaaagacccgcaaggccgcatcgttttaacaccgcatcacaatcttccgggcgatgagcatgtttacgtcgtcggtgattgcgcgagcctgccgcatgcgccgagcgcccagctggctgaagcgcaggcggaacaaattgtgcagatcctcctgaaacgctggaacaatgaagagctgccggaaacaatgccgcaatttaagctgaaaggcgtcctcggttcactcggaaaaaaagcgggcttcggtcttgtcaacgaccgtccgctcatcgggcgtgtgccccgtttattaaaatcaggccttttatggatgtacaagcatcataacggctgataagaaaaaagccgctgattgcgatcagcggccatttttaagagcccgccacatagccgcgcttttccatttcttcatatatatcttttaaatgcggattcccttcccccacaatgacatcctccaccagcacgagcggatagaaaaattcatcgttcttgatgcgctccgcaagctcttctgtctccttttgctgaggcggtgcctcaatatcaatataccgcatgttaaaaggctgctccgggtatttccgtttcagcgccgcctccagccattcaaacgtatctttggcgctcggcatattcacgcagcttgcgcaaagcgtttcagcgccgtaaacactgagcgtaaccggctttgtcatgtatatcatcccctttacaccagtatacaaaggacggggcagcttttgtataaaaaacggtttttatgttcaagtttaaatatgctataatggagaaagcagctttgcaaaccaaacattagatttttaccgttactgtgaatataatggttttatgtatatgaaaggagcgaatctcatgactgaggttgaaatgaaagagcaagtacaggaagtattggataaattacgtccgtttctgcttcgtgacggcggtgactgtgagcttgttgatgtagacgaaggcattgtaaagcttcgcctccttggcgcatgcggcagctgcccaagttcaacgattacgctgaaagccggaattgaacgcgcccttcttgaagaagtaccgggtgtcgttgaagtagaacaagtattttaatcataaaaccaggctgcatgacagcctggtttttttatttttacaaatagtcatcaaaccatgaacaaatataacggatgcgtttcatccgctgttcgggatggccgcttctcgacagctcatgcgtagctttcggaaatcggatgaacgacgtcgttttgttcagtttcttcaacgcggtaaagagctgctccgcctgctctatcggacagcggtcatctcgctcaccgtgcaggatcaaaagcggcgtcgaaacgcgggatgcatattttacaggagaacgatcccaaagcttatccgcttcctcaaacaaatcatgtccgagctgccagtcggtaaaaaagaagccgatatcgctgacaccgtggaagctgaaccaatttgaaatggagcgctgcgtgacggctgctttaaaacggcctgtctgtccgacaatccaattcgtcataaaccctccgtagcttccgcccgtcacaccgagacggccgctgtctaaaaacggatacgcctgaacggcttcatccaccgcctgcatgacatcacggtaatctccgcctccgtaatcacccctgacacgattgacaaaatcctgtccgtagccgtggcttcctctcgggttgacatacacgacagcatatccttgtgcggccagcacttggaattcgtgaaaatacgtatggccgtacatcatgtgaggcccgccgtgtatgtatagaatgaggggatatgtttgatcctcttcaaaaacggaaggctttaaaaaccagccgtttaccgtcagcccgtcctttgtttcatattgcagcttttccggcacggatatgatacgctcctctataaaccgatcattgtaaaatgtcaattgcctctcttccccattttcaagtgaaatgctgtaaagctcggaaggctgtgcgggtttggcaatgacagcgatacagcttttctgatcaggatgaaaagcaaaaccgttcacgtactcttcttctaatcggatcggatatacgaggccgtcaatcgagatataataaataccggtgcttccctgctcgctcccgagaacgtaaaagccctgcccgtcgtttgtccataccggccggggcgtcactcctcctatgattgaatccgcaatcagcgcatcgctcaaatgaacatccagcatgtcggtcaggcaggacagccgctcagttttcacgtcgtacagccacgctttctctaaagtcgcattgcgaaattcattctcatggcccagcatcgcgatataagaaccgtccggtgaaaacacgcaggaaccgaaagaaccgcggtgcggcgtaatctgcttcaggcttccgtccgccagattcatcagatagacatcgctcggctttccggcgtcacccggctcgcataaattggcggtaaacgcaagctgcctgccatccggtgaaaaggccgcgccataatgatcagcttcatgatctgtcagctgctgaatctcccccgtttcaagatgaatcagcacaagctgtgtccggcttccgttcagcaggcccttcccgtcacgtttatatgttaatgattgaatctcaaccggctcatactcgtcatgcttctttttttctttctcatcggcgcgctccgctgatgtcagactgacggacacaagcacggatctgccgtcgggcgcccatatcggatctgatacgccccaaggaatatcggcagcctgttccgcctctccgccggcagcgtcgatgatgtacagctgagggatgccgtcctccctgtcagaaacaaaggcgaggcgccgaccgtcaggcgaccaccgcggacttgtatttttatcgtccccgaaagtccacgggtttgagatgccggattctgtgtcatataccataatggctgaggaataggaatcacgcttatgattgactgttgtccggacgtaagcggctcttctgccgtcaggggcatattgcgggtctgtcacggatacgagtgacgcaatgtcctcctcggttatgagttttttcaatcgtatctcctccttttcttttttatttcgcttccctaaataaaaatccttctccagaaaaagaaagcgtccttctctgatgggaagaacgcttttttatcattatacacttttcacctgctctaaaggattccgttcaattacgcttccttctgacgggacggtaagcgccgcaatctcacagtgagggaaatgctcagaaagctgttttctcagctcttctccctttcctttttcaatcaggacaagaatcgtcggtcccgctccgctcagcgccgttccgtaagcgcctttcatttcggccgcgtgttccacctttgaaagctcaggaacaagcatggcgcggtacggctgatggaggatgtcttttctcatcattttcccggcgagcgcccagtcatttgacatgatcgcagcaacgagaaggttgctgacggcgcttgctttaacggcgcgtcggtacggcagctctttcgggagcacgtctcttgcgtccctggtcagaacttcgtaaaacggaatcactgccacaacatcgatatccgcttcggcaacacgcacgatatgtgtttcatcttcttcgtgaaggccgattacaagccctcctgcaagggaagcagcggcattatcagggtgcccctcttcaagactggctaagtgcagcttgtcgctttccgacagctgcaggccgcataactcatccgcaagctcaatggcggcgacgatagcggccgcgctgcttccgagaccccgcgcaagggggatgtcactccaaactttgacatgggcgggcggcagctctttctgatagcggtcagccgtccgtttggcgacttggtagatgaggttgtccgttccttgagggatgcccgcgacagtttcggtttccgccgagaactgccattcatcgtttcggaaaaccgaaagcttcaaatatctgctgagcgccattccgatggaatcaaacccaggtcctaagttggcggtgcttcccggaaccgtaatggaaaacagcatctccgcctcattcatacacgcgccgctccatttaagtattccagaatactgtcctcatctgtcggcagcgtgatcggttttatgtcagatacgtccacagccgtattcggatctttcaggccgtttccggtcaaaactgcgacaaccttgcttccttttggaatttcaccggatttcacctgtttcaaaacgccggcgatggatgcacaggagcccggctcggcaaatacgccttcttcacgggcaatcagctgataagcgtgaaggatttctccatctgtgacttcatcaatttttccggctgattcttccgcagcgagcacggctttgtcccagctggcaggattcccgatccggattgccgtcgcaacggtttctggatttttaatgacttcgccgcggacgatagccgcagaaccttccgcttcaaaaccgcgcatcttcggaagtccggtgccgtttttctcatgatattctttgaaccctttccagtaggccgtgatattcccggcatttcctaccgggatcgccagaatgtccggcgcttcgccgagctgttcgcatacttcaaaggccgctgttttttgcccttcaatccggtaagggtttactgaattcactaatgcaatcggtgatttttcacaaatcgaccggacgatggccagcgcgtcgtcaaagtttccgtcaatcgcgatgatttccgcaccgtacatgacggcctgcgcaagctttccgaaggcgattttcccgtccgggatgatgacgatgcatttcatgccggctctcgccgcgtatgcggcagccgcagcggatgtgttgcctgttgaggcgcacatgatggtatcattgccttcttctttcgctttggcgaccgccatgaccatgccgcggtctttaaaagatcccgtcggattaacgccttctgttttcacatgcagttcaattccgagcttttcagaaagcttcgggaggtgaatcagcggcgtgttgccttcatgcaatgtcagggccggcgtccgatccgtcaccggcagaaattctttatattgatggatgagtcctttccacattagctccaaccgttcccttctacacgatatgtgctttttacttcttgtacaacttctagatcatttaagttttgcagaatgtcactgaaatcttcttccgatgtatgatgcgtgacgatgacgatttccgcgagatcgtcatgtccttttatcggcagctgcagaattttttcaaagctgacgccgcgctctgagaaggccgatgtgatttttgaaaaagagcccacctggtctttgacatgaattcttaaaaactgctgggcgtagatatcagacggctgcttcagatttctttcaaactgcggggcgacaaagctgtttccgtttacgccgagacgcatgtttttcatgaccgcgaccagatcggaaacgactgatgtcgcagtcggcatgcttccggctccggggccgtaaaacatcgtttcgcctacggcttctccgtacacgtaaacggcattaaactcgttatgcacggcagagagcggatgatgatccgggagcagtgtcggctgaacgctgacttcgattttattgtcatcacgctgggcgatgccgatcagcttcatcgtatagccgagccgtttgctgaagctgatgtcttcatccgtaatccgggaaattccttttaccttgacatcgtccagatcgacgttcatagagaagccgagacgggctaaaatcgccatcttgcgtgcggcatcgagtccttctacatcggcggtcgggtccgcttccgcgaatccgagatcctgcgcttccttcagcacttcttcatacgggcttttttctttaatcattttcgttaagatgaagttcgtcgttccgttgacgattcccatcatttttgtgatccggtcagaggaaaggccttcttcgagcgtgcgtaaaatcgggattccgccggcgacactcgcttcataatacaagtcacagccattttcctttgcggcggctaaaagctctgacccgtatacggcgatcagatctttatttgcggtcacaacatgttttttcgctttcaaggcatcaagaagatattgcttcgtctgttcgacaccgccgatgacttcaataatcacgtcgacctcagggtcatcgatcacatcatagacttctgtcgtcagcacttctttcggcaggtctgcgtctcgttttttatcaatatctttaaccagcacttttttaatcgtcaccggacagccgacctggtgcataagcttatcctgatgatcttgtataattttgacgactccgcttcccacggttcccagtcctaacagtccaatacgaatcgcttccaaagagaaactccacctttcttccttttgtccactagaaaaggacaattgttaacccttcacagacatttaagttacaaatattatataagcccgcatttgttttgacaagcggctgaatattgtttctacggccatgaaaacgcttaacacattgatatgacaagattccctattttctaaatatttttacgttatattttcttacgaactgattccttttccgagccacgccacaggcgggacaaaaacctgcgccgacctgacattcatcatgtcgtgacatgtctgtaaaaactgttcatagcgggtgcagtcggcaagaatgtagtcaagctgctcttcgtaaaactgtttttcagaatcatgagaaatgtaataactctccaccgtctcaaagaaatgaagcggaaacagcaggcggctgtaaaacaggcgcttggaaaaggaggataacggcgtaacttgctcatattcctgcaaaaacaaaaacccttcgttaagcaagtcgtcacgatgatacaaatatgtgctgcgcatatattccgcaatatcacgggcggcatggtcgaatacccaatcgcccggaatgcggatcaatgattcctccgaccaggtatcccgttccatccgctgatggcagattgtccccgagtcttctgcgccgggattgtcatccagctccgtatccactaaatattgaatcgcattttccgctaagcctgaataataaggaaatgcttcgatcattttcttttcgaacggttcaagcggagacatatgaattttctgcatccagaatgattccagctgatccacccgttttccccataagtccttccattggccgatcctgcccgcttctttcacttcgtacggaaaaccccgcccttttctgtgaaattcggcaagctcccctccgacagagaacgaccggtttgcgacggggatcggcgcttttaagagcgcatacgttttgccttcgtcctcaaaggtcagttctccttccttcgtaaagataaacactgaaacgtatgggtcactttgttcttgtaaatactgactcatgtagtaaagctccgtcagctctgattgcgaaaacccggaaacgggaataataagaaagaaggaattaggcgtctggaagcattggtatttctgataaacggaaagctgtctgacgtggatgccgtacttttctttaatgatgcttttcatcataatcacctgcctgaaaaattagagctattcacatcgtagtcatacgccggcggaattatgaatacatattgtaatcctttgaatcaagtggagaaacatcgtacacatcggaagggtgttgtataaactagtaaaaaaagattgggtgaagcaaatgtcagaaaaggaacaactgaatcaggtggaagctgtcgccagagcgcgtttaaaagaacgggggttgagacggacgatattgccgagctggtgtatttccttcagaaaaaatatcatcctgatttgacgatggaagtatgcaggctcaatgtggaccgtgtcatcgcaaaacgcgaggtgcaaaacgccattttaacgggaatagaattagatgtgctcgccgaacaaaaaaaactgtctgaaccgcttcagaccattctggcgattgatgaaagcctgtatggggttgacgaggtgctcgccttctctatcgtgaatatatacggctcaatcggctttacgaattacggctacattgacaaagaaaaacccggcattctcgggcggttaaatgataaatctacgggggaatgccatacgtttcttgatgatatcgtcggcgcaatcgcagcagcggcttcaagccggcttgcccacagcgccagaaatacagaataaggacggccgtcatggccgtcccttttttatagatgttcaatccattcggttaaagagtcaatcgcatatgtcggcttccggtcgtaatctgccatatgctcacgctttgtcactccggtatgaaccagcagcgtatccatgcccgcattgaggccggccataatatccgttgcatagttatcgccgaccatgagtgtttcggaaatatccgttccgagcacacgcatcgcctgttccataataatggattcaggcttgccgataaagacaggctcaacgcccgttgacaccgtcaaaacggatgtgagcgaaccgttccctggtaaaagccctctttcagtcggaatggcgacgtcgccgtttgttgaaatgaaccgggcgccgtttctgatcgcaaggcatcccgttgccaacttttcatatgtaatgccgcggtcgattcccacaacgacaaagtccgcgttttcttctccgaagctcagcccgttttcttcaatggcctggcggatgccttcttcgccgatcacatacaccgacgcgtcttttttctgctgggcgatatgctgcgcagtcgccatgctcgtcgtgaagacctgctcttcagttgccggaatgtcaaagctcatcagcttgtccgccacctgcttcggcgtccgggaagaattgttcgtcacgaataaatacggaatgccgcgcgctttaagcgttctcacgaattcacacgcttcttcgattttttccgtcccgttgtacattgtgccgtccaaatctatcaaatatcctttataatccttcatactcaacactcctgtggattttctcactcgttgttatttaaatgcggaaacaggccctaattctgtttccaggtaggttcttacacgggccggaaaggctttcagcacgtccctgtttgacgtgatcagcgtaaacagctcctgatgatcggcttgctgatattcctgaacaagccgctttctggaagagatcagctgcttgagcttattcgcttcatcctcagctaccaccttttcatccgtcagaatatccatgatgtcgtcataactccccggatcgcgcatgataaagccgtcaatcatatcatttccgacatcgagaatgcattcgatcataagatggctgatccgctcaagcgcccttttttcgatttcgctctgccatgcaggcgtgctgtcaaacagcgccagctgggtctcaaaaaaacggagtgtttgttcgatattatttctgtcaacaaaatacacgtgacagcatccccttctgcatcaattattttctgattcgttttaaaacaaaatacgcgcagccgaaattgcagtattcgtaaatgtattcgtccaatgtgctgattttcgtttcaaaggttgctttttgattctggtcatcaaagaagcctttgagccgcagctgactgtatccccagtctcccacaatgtaatcatatttatttaatatgtccgaatagcgggctttgaacgcttcttcattaaagccgtttttaaaatcgtgtacgagttcaaactcggcattttgaataagaatcatgtcttcacctcttttatcactctttactatcataattcattgacttctgtccatcaattgcaaaatgagacggttcggacggacggaaaaattttccccttttatatccagtgtagcggttctgacgatccttattcaagaatgactttttccctgcacagacggctccatcacaaaaaacccaaaacctgcggcgttttgggttttttcggcttatcttatgcttgggcctggcgttttttagacgcttcgttcacttgttcatccgcatgataggaagaacggacaagcgggcctgcttcacagtggctgaagcctttttgcatcgcgatttctttcagttcggcaaattcgtccggatgataatatttttggacttttaaatgttttttcgacggctgcaggtattggccgatcgccatgatgtcgacattgttcgcaagcaggtcgtccatcacttcaataatttcttccttcgtttcgccgagaccgatcataatgcttgatttcgtcgggatgtcaggctgcatttctttcgcacggcgcaagaattccaaagaacggtcatatgttgcgcgggcccggactctcggtgtcaggcggcggacggtttcaatgttgtggttcagaatatcaggacgggtatccattaatgttttcaggttgtcgtaatttccgcccatatcggatggcagcacttcaattgtcgtgaacgggctttttctgcggatcgcccggaccgtttccgcaaagacgcctgctccgccgtctttctgatcatcacgcgccacggccgtgatgacggcgtgctttaagttcatcagtgcaaccgaatcagctacgcgttccggttcctgcagatccagctcagtcggcagacccgttttgacagcgcagaagcggcatgctctcgtacagacggaaccgagaatcatgaacgtcgccgtacgtctgacagcccagcattcatggatgttcgggcattttgcttcttcacatacggtatgcagattattttcacgcattaattttttcagacccgtatagttttcattcgtgttcagctttattttgagccattccggctttctcagatgctcgtctttctttgccatttccccatcatctccattatccctttattcatgttcgtgtgcgaaaaatttctatttcacgatggatataaaacttgcagatttctattcaatagtcactttaacataggaaaaatttctcgacaagggaagagaattacttacattttctcggattgttgccgcaaactagttgtattaatcctgaaaggagatcatgttgtgaaagttctgttatctgctcttctccttttatcagttttctgtccggctgcaagcgggaaagaacaatcggctcctgtttacggtgaacggatgcagttgtaccgcaaagccgaagcagtcacgcagattccttggtatgtgcttgcggcggttgatcaatatgaagaaaatgtccgctcgaaccgaaaggatctgccggaaaaagcgggaatcatcagcatttatattccggatcatttgtggagcgggcctgaaaatccaaatcctaaggacgaggcgcccctcagcattaaagtatttgacgggatcggcctggacggcgacggcgacggaaaagccgaggtcagcaatgatgaggatatcctttatacatttgcacagtatttagcgggattcggaacggatcttgaccatatccgcatcggcctctggaattattaccgccgtgatcagacggtcggcattatcaccgaattcatgacactgtttaaaacgttcggccgccttgatctcggagagcacgcttttccgcttcccgtgaagacggattacagctaccgcagcacatggggcgccgcacggggtttcggcgggcgccggattcacgaaggaacggatctgttcgctcattacggactccccgtcagatcgacctgctacggtattgttgaaatgaagggctggaaccgtttcggcggctggagaatcggcatcagggatatcaataacacgtatcactacttcgctcacctgaacggctttgcaaaaggtgtgcataaaggccagatcgtcaaacccggagaggtgatcggctctgtcggcagttccggatacggaccgccgggcaccgcgggaaaatttccgccgcatcttcactacgggatgtataaagataacggcagatcggaatggtcttttgacccgtatccccatttaagggcatgggagcgaaaagaaatccgcaggaaaaagtaaacacacagccgccaggaaagattgcggctgtgtgtttttatttatctttcttctgtttttcactcggcagctggacagaaggcgtcacacctgatccgccgcttccgttataaaactgcggcacctctccttgaatcgctttaatggagaccggaatattatttgtgacgactgatgtcttactggcaaacggaataatgaccttcactttaatttccacaaaaatactgatatcgatcagggcattgttaatgccgtacggctttatttttgttttcacatcagttaacgcatcaccgatcaggttaaagcgcacggggattttcggccccagatttccgagaacgctgtttcccgtgacctgccctaaagggatgttaatcataatttcatcggccgttttcgcgcctttttccgtttcatgctgcttattgttcgactccgcttccttcaaatgagcctgaagctgctttgtcactttcgccttcatgctgttgaccatttgtgtattaaaatccatcgttgtgacttttccgttttcatccgttttcatatcgaccatatctttcacattgtcgctgtgagacatgtattcttcaatggattccgtaatgacctctgtcgccacccgtttggtttccatttctcctatgttcatcagcaccggtttgattgaggagttgatcatccagaggctgatgaccgtcgatatgataaaaaaagcaaacgacagaagaagcacatatcgaaaaggcaaaggccctctcttgcgaagagcgctccggtatctaggcaagaaaaatcccccttacatatcacaatgtatgcttgtaagaggggacatagtattttatttttgctcttaaaaagtcccgcttaccttcattcgggtgagatggaacggccggcggatatttgacattacgcttgccgcgcgagcttccaggcgagcagatcccttaaaaactccggcataaaatattgtttttcttttgaatcgcggatgtaagggaacagctttccgagtgtaaacatgtcgagaacggcaaccgagtatatccgctccggatccacctcttctccgttcactttcacattgaggagatgcgtcacaccgtcttcaaggatgccggcctctgcctccgctccggcatataccatcctgcccatcacttccccgcggaagccgaggcctttaatccgcagctgctccatttgttccgaggcggcctggctgattgtttcccggagttccctgcctgaaagacgaacggcgaccggattgatcggatgagggcagatgcggtgcaagtcaagttttgtgacaggccccttctgtaaaggccccaaaatgacgcctgaattcaccatgctgacttcacagccgcaccagcttttcagcgcttcggctaatagaagcgggagcggcgattcctcaaaccacttcacgccggcttcttcattcagattggcgacttgtacggagagcaggttttccgcttcccgttctttctctttcagaaaagccgccgtatcttcagattccccgtgccaatcagccattttctgtacagatgcctgtttgctgacaatggttcgtgattcactttctatcgtcagctcgacacagccgacatagttcccgtatttctccgcacatgcaagcaatacgccgtttatatcctgtccgtcctcaagaaggtggtgcgtatgtgattcaagaatgacatcgatgtcgggaaatttttccgctgcggcccggtcatcgatcaggcctaaatgagaaagcagaatgatgatgtccgctttgcccttgatatcgtcaagtgattcttgaatgcttttttccgcatccgtcaccgtccagccgagtttctgatagacgggataatacggcaccgtgaccccgagtatgccggcggtcatcccgtttttcagcgttttgatcacgtagggctcggcccattccggccgctgtccgtccgcgtcaaacaggttggacacaatgacgggaaacgcggcatgagtatataaacccgccagctcatcgtgaggcagcgtaattccttcattattcccgacggcagccgcattgatctcaagccggtttaacaagtcgacattcgctttgccgaaggtcgcttccgttatcatttgaaatcggtccatatgatcgccgatgtcgaatacgagtgtttcctccccgtttttttcatgctcttttctcttctgctcaatataatgtacgattttcggccaattttcgaaatggctgtgcaaatcattcgtatgatataaacggagtttctctaacataccatctctcctaccttttagctgaatatcccttgataaatcaattcacagccgatcaaaatcaagacgacccgcatgaaaagcacgatcgttttcgtctgcacccgcttattgacccacgcgcccattttcccgccgaaccacgcgcccggaacgaggcacagcgcatacagccaattgacatggccctctgcgatatgtgacacggaacccgtcacggaggataagaaaatgatgagcattgacgtcgccacagccactttcggcgggaacaaaaataacagcatcatggccggaaccataagagagccgccgccgatgccgaaaagaccgcccaataaaccgacgaaaaaggcaatggcgataccggtaaaaatacggtacgaatatgtataaagctcacccgtttcatcctcatatgtccggatcatgcctttatgcgctttattgaccggttttgctttcgccttcagcattaatgtaatagaaatcaaaatcataaaaagtccgaaccagacggaaaacgtatgcgcattaaaaagtttagacaaatacgcgccgatgatgcttcccgggccggaaccgataaaaaagatcagtccgcttttgtagtcaacggttttatatttcatataggccagagttgatgacaggcccgtaaaaataatcaccaaaagggacgtgccgatggcagtctgcggtgttacgtcatggaaaaacggggtcatcgtgcttaaatagagcatcgccggcacgatgataattcctcccccaagcccgatcaggctgccgaccgttcccgcgataaatcccaatataatcaaaataagataagacatgtgtcttgaaacctcttttctagctgaataggtcgagctgcttcggagcaagcccggtatatgagatatctaacatttcaagcatctcaagcccgttatcggcggcgtctccgcctgagttattgttgaagagcacatacagattgcgcgactgctttttcagctcctgaagattgtttttccaatctttgagctcctgtttgttatagcggtataaatatctgacctcacgccagttttgtccgccgtcaggtttgatccagccctgcttgttccgtccatgaaaacggacaagcgttttttcttcatccgttgctttcaggacggtcggaatgctgccctcgccgatttgcggctcgtcacatatgctgtgaatccagccttcctccttcataaaggaaagcgtctgttcgtaaaatggcggggaaaaccaagatcggttgcggaattcaagcgcgcacgggatatcgcccatctgcttcctgcaccatcttaaatatgcgacgttttctttcttgcagtcaaaccacggcgggaattggaacagcaccatggcaagctttccatgctctatatacggcgataatgacagcttaaacgcctcaaacatttcttccttcgattcaaagggaatatcaccgcgctgatggcccgtcattccttgaaatgccttaatgacaaattgaaaagattccggcgtctctttgacccatctttcgttattgcgggcgggctgtatcgcgtaaaagctcgcgtccagctcaacgatgggaaaatgggaggaatacgcctgcagtttttgcgggcccgctgttttaggcggatagatgctgtcatgatccccccaccccgtcagtccgatataaatcacaatccttcacctctcattctagtttatcacaggtgtttttctctttccgtttccatgttttttctgaatgcactttgcaggtaacggtactgatgttcattggtgtccgaaaatgcctcatctctggaagaaagaatatgctgatagacgatcggctctgaaaactgaccgctcgtgaaatcatatatctccccgtctattcgattataaaaatgccagcttgtgccggtttttgttttgagaatgtcaccgccgtaaacatcttggatgactaaagccgtcacgccgcactggcctgtggccgggcaatcttccgtccattttgtactggtcttgcgcgaccaggatgccgttaatatgttcaagatttgatcatacaatgtgttttactcctttttataaaaagataccacgagacccgctttccaaacgacaaaaaaagccgattctcatcagagaatcggcttttttatttcacaaggcttcaggaatgttccgaaagacccgctctgcttacgaccgccatcctgatacacacagcaccccttgctgtaggtcgcagcaattcggtatggaaaggtgcggccttcatacaggctttgcttatgtttggaaaacatcgtttcttttgtgacggtaaaaggttccggccggacaatggcaaaatcagcgtcaaatccttcttcaagccggcctttattcgttaaaccgaaacgcttggcaggtgcttcggccgtccatcgggccacatgttcaaacggaatcccatgatcgatcgctaattgaatcatgccgagaagcgtaaattggcctccgctgatcccgccccacgacaggaacatattatcctcgcgtttcaaagccggatgacagggagaatgatccgaagacaccatatcaatcaggtcttcagccaaaaccccgatcaattcctctttatcagcctctgagcggagcggcggagcgcatttggcagccgccccttttttgaggaagtcttcaaagctgaataataagtagtgcggacacgtttcaacggtgacatccaatccgtcttttttcgcctgctgaatggagagcacggcccgtttcgtgctgatatgtacaaaatgaagcgcgcatcccgtcgctcttgcatattcaatcgcccgctgcacagcctcgcattcggcttcttccggacgggaggaagcgtaagcgcgggcatcaattttcccttggagcgcgtactcggcttcaaggaatcgggtgagggcgtcgctttctgcgtgcagggccaaaatcctgccgcacgccgcgatttccttcattccctttaaaagagtccgttcatcggctgattgaaattcatccgttcccgatttagacagaaacgctttaaacccgattgcccccgcttctgccatcggccggatatgttcggtatacccgggcatcaaaccgccccaaagcgcaaaatcaaccgctgacttccgttcggcgatttccgcctttgccagcaggttttcagcagttaccgtcgaaggaatgcagttaagcggcatgtcaaaataagccgtacagccgccggcagcaagcatgtttgagccggtttcaatgccttcccattcttcgcgtccgggttcattgaaatgcacgtgacaatcgaccgcgcccggaaacacatacatgccgtctgcctgcaccacttgttccgcgttttcgtcaatgccgggctcgatcaatgcaattttcccgtccttgacggcgatatcggcccgctctgtcccgccttttcgcacagctttcgcaccctttacaattacgtcataggccattttatcttcctccctgtaaggatgacgattttctgtcagtttttatcacaacatgcgtctatgattgccagtttactgctactatgatcgtaatacatcagcaaaaccgctataatttttgatgacttttattcatattaaccaatggttgtctttagaacctgaaaggagattgactgatgaatatttatgatgtgatgaagattcccgcttatgagcgggccgcattaatcgcaggcagatccggcggctggagggaggtgcagcacgtcaacatgatggatgcgccggacatcgctgattttttacataaaaacgaattgctcgtcacgacggcttaccacttgaaggaccgcccgcagctgttgaaagatttaatccgcctcatggcaaaacggggatgcgcgggactggggatcaaaacgaagcgctatcttaatgtcattccgaaagatgccgcagagcttgccgaccggtatgaatttccgattattgagctgccggaagacatcaggctgggagatatcgtcaatgctacattgagccatattcttgatatgcgttcaaatgagctgcagcaggccatttacgcccataaaaaatttacaaaccacatcatgagcggcaaagggctgcaatccctgcttaagaagctctcagacattctccggcttcccgtgctgcttttggatcagcatacaaaactcttatcatcgtcccacagcatacccattgacacgtctttattgaaaaacatctgttattccctttccggtccttatttcacctgcttttccatgctctccgacagaaaggtgtattctgtcctgccgattctgaatgttgaaaaaaactgcggttatctggtgattccggagctggtgcagaccgctgataaaggcatgattttgacaattgaacaggcggccaacgtcatttcctttgaactgctgaaagaaaatgccgtcaaacaattcggcagacgggcgcgcaatgaatttttcagcaatttcatcgaccgctcgtttaccggccatgaagaaatcaaaagccgtgccaaagaattccggctccgctgggatcagaaatacatgtgcatttgcggaaaactcgaccgaaatgagaaaacgatcagctttaccgaaaatcagctcgtttccgatcatgtatttgatctgcttgaaggggagctgtcatcctttccgtttccccctcatctctttattaaaggaaatgtcggtattcttttaattgaagcgacagacagctggaatgaaatgcacgcgtctgtcatcagctttttggagcagtttcagaaacaggtccggacgcagtttaaacggactgtctccttcggcatctcaaacatatgccaaaagctgatcgatgtccctgacgcttttactgaagcttcagacgccatttcatccgggcatttgtccagaagcgcggagtttattcaaatctatcatgccaaagacgtgccggagttgctcggcctgcttccggcggaagatgtgaaaaagttttacgaagccaccctccaaagcctggccgaccggcaaaaggaggaccagagcctgcttcatacactgtctgtttacctggaaacccactgccagatttcagaaacggctaagcgcctgtacgtccatcgaaatacggtgatctatcgtttagaaaaatgcgaggaactgctcggcaaaagcttaaaagatccggagacgacgatgcgcctgcggctcgcgctgagaatgcagcggctgatcggttaaaatttagccatagaccaggatgcgggtgttctcccgcatcctatttaagggggattcattcagctaaaccctcaaaaaatgctgccattgatatcatcaggctttttcgatattcaggatgcaaccgataatctcaccctttttgatttcatcctaaactgcctcggaacctttgtcacaagcacccatgacccttttttgatggtttcgccattcatttgaaaatcagcggggagcgacacaagactcaaccacttccccacgccgccctgaaagtcatgctgcttttccttttctgatttcataaaaaaaccgcttttgattagcagccttatctacgtaagaaacatgtatgatgtttgcatttatcaattcacttggcatgtgttcactcatttcaaagaatatttaacaatttcttcattgttatatttccattaagtgttactgttatcctataaataccaaaaggaggttttacgttgaaactagctaaaaatgctttgttatcacttgcaattgtttcattcgttttcgcgcctttttttaactcttcagcatcagccgccggtccctctactaaagtgaataagaatttgtttcaatctcagtctgaaacccgcgtcaatttaaaagtaggagagataaggaattattctacttctggtaatcgcatttcctttaatcctacgggttataaccctcctgctgtgacatggagagctttaggtactgactacaaaaccattcaggtatttgcagtcgctaaaggagaagcctggattgaattctatgatgattcctccacttggaaaacccgataccattttgtagttcagtaataatccgaagagatagattctatctcttctttttaattaaacgattgcgacgttttgaattttttatttttcctcaactgacagccccaaaatctcgttatctactacaggagacagaacgcagtgacaatgaacccgctcagcggcggaaagctttgtgtctcgcggatacatacaggtttcgctgcttcctggtatcttgaattcttcgtcaacaccaacagtcgaacacatcaagaccaaaaaccgcttctgacaggccgcgcaaggggattttataaaatttctgaaaaaggaggggcgcttcccctccgtgaaccgtaataaagcttcgtgtgttggctaatggctgtctggataatggtctcactgtcatcctggaaagatcacttacttctataagtctttctttttaacagaaaccgcagatatagcagcagaaataactatccgctccgcttcttatgcactctctgtaacatggggaattataaaaaggagggcgcgcggaaacatagggggagccccctgaatgagtcaattgatgggcccatggataataattaaattcttgccgctgatacaaatggaatgacgggtaataatacaacattttcaactccttttccgtacaccatattgtacttaccgacatcctttttagatgattgtctcttgcataattgtgtgttggcctaattgcgggttttaatctgcaaaattcatgcaggagaaccatcacaacatcttccgggagaggttttataagataacctctccttgttgtcaccaatcgccccctactgaacagttcgtattatttcaatgacccgttttatcagaatgctctccccctgcatacgaaacagcaagttccaaaaccctgctttttccttctcagcatttacgccgctcaatgttgtccctgcctgcctgactgccttcttttttgatcaacttccggcagatcaaattcatcagactcgtcaagcgataaagctggttttactttatctacacctgttccggtttccattcgcgccatgcttgagcatacggaacaactgtttttgctatatgattttccctctatgcgcatctctgcaatttcagagatgcagacagccgcagaataaacgacaatcagcaaaaagcctccggatacccggaggcttttgattcttatccttgctgcgtgaacggccgggtctgtgtctttttgccccagccaagcgcggccagaaaactgatggcgagaatggccgctcccagcatatacggaaattccatatttacatcaaagagaaaaccggcggccgacggcccggcgatattcgctaagctgatgaatgaggtgttcatcccgccggcaaacccctgctggtcaccggcgagcttcgacagcatcgtattaacggccggccggagcagcgatgtcagcgtcaggaaaaagattgccgcggcaaaaacggcccaatatgaacccgcaaaccggcaccacacaagtcctgcagcagccccgatcaacgtcacgttaatgacgcgcttttccccgaacctgcggacgagataactgacgccgaccgcctgcacaaatacgccgatgagacccgcagccgtaataataaaggcaatatcagaggctttaaatccgtgtttatggtcaacgtaaaggccgaaaacggattcaaagttcataattccgaagttcagcacaaaaaccagaatcagcataaacgcgaacggcgatttgagcgcgcgtgacatttgcttaaacagatgctcacgtttttccgtttttgcccgggcttccagctgcttttcacgccccagcgtttcgggcagaaagaaaaatgaaagcaccgttgaaaagcaggcgagacttgcggacacgatgaacggcacagacatgccgtaatgaaccaaataaccgccgacaccgggcccgatgacgacaccgagcgtcatcgccgcgctgaacagccccattcctttcccgcgttcttcctcggtcgtaatatccgcaatgtaagcgaacattgacggcattaaaaacgccgcgcccattccgcccaaaaggcgggatgcgaacaattgccacaggcttccggcaaaggcgaagatcaattgtgacacggcaaaggcggcaatgccgaaaataatcagtttccgccgtccgtatttgtcggttatttccccggcaataggcgcaaataaaagctgtgtaagccccgccgccgcaacaagcagacccatcgtgctccccgtcgctccgaattcggtaatatatgcgggcataatcggaataatcaatccgatcccaagcatcgcaataaacatattcagcattaaaattgacaatcgccccatgtacgccatgatttcttaccttctccccagacaaacagatgatcattccatatttgtcattttttataccattcagtataacggggaaaagggaaaaaagtccagatgatttcaatctcgttttcatatctcatgacagcataccggtttcagccggcagatcatatatgttaagggccgcctgcagcgcttccccggctttaactgcaactccgtgtctgatcagaaccgcttcaagtccggccagcacaaacagcacattttcctttctgcagctgtagcccatcgttccgattctccaaattttcccctgcagcggaccgaacgaactggcgatttcaattccgaattgagacaaaagcatactccttatcgattcgccgtctgcttccggcggaatcttcacacatgtgacgacaggcagcttcgcctccggatcgccgaataaatcaaggcccattgctgcaagtcccgccgtaagcgctttttcatggcgctgatgcctgcggaaccgttcttcaagtccttcttccagaacaaggcgcacaccctcccgcagcgcataaagcattgctgtcgcttctgtatggtgattcagccttctttcactccaataatcttcgagctggctcagatcaaaatagttgctcgtaaccggccgatgaccggacagcattttaccgtcagctgctgtcgcaatgccccgttctacctttttacgcgcggcaatgacagcggccgtccggtcattataagtaatcggcgccattccggaagggaccgataggcatttttgcgttcccccgatgactgcgtcaatcttccattcatccgtttttacggcgcatccgccaatcgtggccacggcatccacgataaagagtgcatcttgggcgcggcacgcttccccgatttctttcagcggatgaatccgccccgttgatgtttctccgtgcaccatagcgacgattttcggggaaatctttttcatctcgccgataatctcttcaggccggaagaccgttccccattcacactcgatcgtatgaacgtccgctccgtaccgctcggcgatttcagtcagcaggtgtccgaagcgtccgtatatcggaacgagcacgctgtcgccaggttctatcacacttgcgagaacagcctcaatccccgctcttgatgtgccgtcaatcggataggcccagcggttttccgtttgaaacaattcacggagcatttgcatcgtttcgttcatgataccggtaaatgccgggtcaaactggccgaggatcggagcgcccatcgccctcagcactctcggttcagcttctgtcggtcccggtgtcattatcgttctttgcggaatgcacaattcttttctggtcggcacgccgattccccctttacgttaataagcaagtttatgtaatacattcgccagcgtaaggacgccggtttcaagctgatgtgcgggtgtgaattcaagcggcgagtggctgatcccgccacggctcggcacaaaaagcatgcaggccggaaaggttctgccgagcatctgggcgtcatgtcccgctccgcttacgatcttctccgggtccgccccctgctcttttgcagcctgtgctgcggttcgtgtcagtatgtgatccatttgaaccggctctatcctcatatattcatcaataaagggtctgactcctttgctgcggctgatgttttcaataatcgacaccagtttctgatggaaggctgccagcacgtcttcctgctggtggcgaatatcaacggaaaactggatacggcccggaatgacattcgccatattcggctcaaccgtcattttcccgcacgtcaggcggagctcttccggctgtctttccgctgagagcatgagttcatggatgatgctgcttcccgccgcgagcggatctttccgccatttcattgaagtggtccccgcatggttgcattcaccgtcaagcgtaacggtatagcgtctctgtccggcaatcccggtgacaatcccgatatcctttcccgatcgttcaagcgtttgcccctgttctatatgaatttccagaaaggcactaatatcagtgcgcagcggcgccggataacggcctgcaccgaagccgttctgccgcatggcttctttcagagaaatgccggacgcgtctttcggcgtttccgcatctgaaagcgagaaagcaccggtgatattgcctgagccccaataggtgatgggaaaacggctcccttcctcttcacagagcgacacagcctccagcgtttttttcggacgcccgcacgtctcatgcaaatgccggatcgccagcatgcccgccagcacgccgaacgcaccgtcatatttgccgccgtcaataacggtgtcaatatgcgacccggtcagaatcacctcatcaggcgattctgtgccgctcagacggccgaacacgttaccgacatcgtcaaatgccgtttccagcccgaacgcctccattttctttttgacggcaagctgggcgtccatccattctttcgtatataaaagcctcgtcactccgccggaagcggaagcgccgaattgagacagccattgtatgtcatcggaaatcccgatattcgccgccgaaagctgctgatgttccatatatgccctccttttaaactgaaaaactgacaagatgatcttcattatagaaggagcgcataacgagttcattatcatatcttccaaaaaatcaatgattttccggatactttgaccaagaaaccgcccctctgtcccataagccgaaggaaccatttttcaaaaaagatagaatattagatttattttttggataatagaggtaaaggagggcaagtcatgacaaaaaaactttggtttctgccgattgtctgcctgtttttcattttgggttggaccgcgccgtcagcctctgcgggcgcgccggctgacacgaatctgtacagccggctggcggtttcaactgccggcggcacaactctttttccgcaaacttcctcagctgtcatcactccgtctgcggatacggagacatattacaaagaagcttccggaaaaagcggaacagccttaaagagcgccctgcaccgcatcatcagcggacatacaaagctgtcttacagccaagtatggaatgcattgaaggaaactgacgaagatccggcaaacccgaacaatgtcatcttgctctacacccaggaatcacgggccaaaagtaaaaacggcggcagcgtcggggactggaaccgtgaacacgtgtgggcaaagtcacacggaaacttcggaacagctgccggccccgggacggacattcatcatctgcgccctgcagacgtccaggtgaacagcgccagaggaaacatggattttgataacggcggctcagaatacccgaaagcgccgggcaattattatgacggtgattcctgggagccgcgcgatgaggtcaaaggagacgtcgcccgcatgctgttttacatggcggtgcgttatgaaggcggcgacgggtatcccgaccttgagctgaatgataaaaccggaaacggctcagctccttacatgggaaaactgtccgttttgctcaaatggaataaacaagaccccgtcgacagtaaggaaaaacggcggaacgaaatcatttacgaagactatcagcataaccgcaatccgtttatcgaccacccggaatgggcggacgaaatctggtaatcgtatcataagaagtgataagggagccccatcatcaggctccctttttcaatatacggcgttttcagtgtcggcatcaaaaaacacggcccggttcatattgaccgcaagcagaatggcatcgccgggtttcacctctgaagcgccgtcaaggcggatcgtcatgcggtcatctccgctcaccgcatgaacgtacatctccgcgcctaagttctcacatacttccgccacagcgcggcacaccgcttcaggcgggtgctctgattgtccggcaagcgtcaaatgctccggacgcagccccgcagtcatctcctgaccgctgtatcctttctgcacaagaacggccgctttttctttcggaatgggcagacgaacggacgaaccggcaaaataccattgcccgtgactttcttctatgacgccttttataaaattcatactcggagaaccgataaaacccgccacaaacatattcgccggataatgataaatctcatgggggcttgcggcctgctgaatatttccttcattcatgacgacaatccggtcacccattgtcatcgcttccgtctgatcatgcgtcacataaacgatggtcgctttcaaacgctgatggagcttgctgatttcggcgcgcatcgtcacacgcagtttcgcatctaagttggaaagcggctcgtccatcagaaacactttcggctcccgcacgatcgaccggccgagcgcaacccgctgccgctgtccgcctgaaagagccttcggtttccgcttgagcagatgcccgatttccaaaatatcagcggccgtccggactcgctctgcgatttcttttttcggcagctttctgagcttcaaaccgaacgccatattatcaaacaccgtcatgtggggatacagcgcgtaattctgaaaaaccattgcgatatcacgatccttcgggggcagatcgttcaccgcgtctccatcgatataaagcttcccttcagaaatgctctccagtccggcaatcattctgagtgtcgtagatttgccgcagccggagggaccgacaagcaccagcagctcctcatcctttacatctaagtgaaaatccttcactgccgccgattgggcgccgtatgtttttttgatatggtcaaatgttaatgatgccattcgaaacctcctccaatactggaaaccgccacatctttctgttatgttaaaaatgttcggggtttctgacagattcataaatgaaaggcaaatttgtattataacatcataatacatataatagtactactacttgacaaaggaggtccgtcccattgttaaataacgggagctcgaaacctttatatattcagctgaaacaaattatcgcggacgatatcaagaagggcgtttattcgccgtccgtaaaactgccgactgaaaatgagctgtgcgaaacgtacaacgtcagccgcataacagtcaggaaggccatccttgatcttgtggaagaaggctggctcgtccggcagcagggaaagggaacgttcgttaaaagccctaaactgaagcgggagctcatcgcggtcaacggctactctgaatttatggaatcaacgggaaaaaaaccgaaacaccagatcctttcccatgaaatcattgaagcgcctaaatccatcgctcaaaaacttcgcgtcgcttccgaaagtcccgttcttgaattaaaacgcattttatttcacgacgaccagccgctctcattcgaaatcgcccactatccgctcagtttatttcccgacatcggcaagcatattaaaggcggcgtgtcgatgcatgacattttgaaacagcactatcaggtggtgcccacccataatacgaaactgttaaatgtcgtatacgccaagcaggaagaaagccgctatctggcttgtgatatcggggatgcgctttttgaaattgacaaaaccgcttttatgtcaaaagaacagccgatatacagttcgctgtttttaatgcataccgaccgcgtcacgtttaccattaacagcccctatgcgtaacaagtataaaaaacgagacaatgcttatcgtattctcgttttttcactgcttttcccgccgtccggcctgtagggatgcccgtaaccgaacgctccgaaccccccgcatgttttggcagccgtcccggcggccgcagtaagcgctcgccgaatatcctgatgttcgaagaaatcggtaagaaacccggcgataaaagaatcacccgcccccaatgtatctattatatcagctcttaccaccggctgatgatagacgcgttccccatccgataacaccgcgccatgttctccccttgtcagacaaacgattttcgctccgaaaccgcgggctttttcggcaagccgcacacattcactttcactcaaatcactcccggaaaaaaacgcatacgtcacatacggacagaccgcttctaaataggcttcgtcacgttttacagagaaatcaaaggaaatcggcacatggccgctcagcatcggaaggtcacgttctatcctgctgtatacgctcgtatgcagcagatcatgtccggcgataaatgagatgtcattctcctgaaaagcgagcgtcagacgcgattgcacgccgcctttatttgatccggcaaatatcctgtcccctctttcatcaagcgtgacgaccgccatcccgttttctccgtatgcccggcggatcagatcggcattcaccttctccagtttcagcacattcaatacgtgatccgccgcttcatcactgccgagaatcccgatataagaagtttcgtggcctaagcgccgggcaagcacggctacatttaacgcatttccgcccgggtaaaacgtctcctgatcctgataataatctactacattatctccggccgctatcagtttcatcttttcatcccccttatcctttcacgcttcccgctgcaatgccgcggataaaatatctctgcattaataaaaacagcgcgataataggagcagcagaaatcgtcagcccggccagcagcacgccccaatccgtctgcagcgcatctctgaactgcatcagcccggccggaatcgtccgtaaattttcatcatcgataaaaataatcgcaaacataaactcattccatgtatggtaagccgtcaaaatgcctgatgtcaccagaatcggcacgctcataggtaagaatattctgaaaaatattccgaaacttgtacatccatccagataggccgcttcctcaagctctttggaaatcgacaaaaaataggaacggatcagaatcacggtaaacggaatacgataggctgcgtacggaagaatcaatgcccaatacgtattgtacagtcccaatgactggataatggagtacagcggcacaagactgacctgcggcgtcagcatcaagccgccaagacaaatgatcagcacaaacccttttcctttaaattgaaaacgggccagcccgtatgccgcccaggcactcacaaatacggtgatgagacaagtcagcacggtcacaatgacgctgttcataaaataagcggaaatcccttggttccatgcggatacgaagttttcgggatgccagacagagggcagcgaccagctgtgctcaaaaatctcatccgagcttttaaaggcgctgaccgccatccataacagcggataagcaacggcaatgaggtagataaagagaaacagccacacagacgtttccccgacataccattttctcggttttccgcctgttctgacggcctgacgggcatgacgcaagtccgtcttttcaggaagcatcggcctactcctcctttccggtcttaaagaatttcatctgaataagcgacagagcaagcgtcagcaaaagcaccaccgtcgcgatcgcagaagcgtagcccatcatatcctttgtaaaagcgctcttatacaaaaatgtgctcagcacttctgaagcattgcccggccctccgccggtcagaatatacggttcattaaatacggtaaatgcgccggtcagcgtcatcaccacggcaacaaacgacatttctttcgtctgcggcaccgtaatgtgaaaaaactgctggatttttccggctccgtccagctgcgccgattcatataattcagcgggaatgctctgaatcgagacaatgtacagcatggcgatgtaaccgacagactgccattgagacacaaaaatgacagacagcatagcggtgttttcatcgcccagccacgcccgggtcagttcatcaagtccgacggcttccagcagctgattcaaaagcccgatttccgggttataaataaaatcaaacaacagcgcaatgacggtcatggaaatgacgaccggaagaaaaaataccgtacggaaaaacggcgaccattttcttaccaatctgtcttccagcacggccgccagaattaacccgccgccaacctggcaaatcagcgatatgaccgcatacagcacattgttgcggagtgctgtaaaaaacacgggatcgtggaacaggtcaatataatttttcaaaccgataaacgtcttttcgggttgaaatgagctccattcaaacagactgaaaaacacattctcaataatcggaatgtaaacgaacagcagaaaaaccagcgcgggcgcgagaaacagatacggaatgaaacgctttcggctgaccaaagaaatcctcatctcctttctccaaagaaatctgttctattcagatgacgctttgacctgacgcgccgctttctgcacggaattcatcacctcgcgcggtgtcattgtgccgccgagcatctgctgaacgcctgccgcatacacatcggcgatttcaacgtcaacatccatatcaaaccacggcaccattgtttcggcgcggacgatatcctgcacggcttcgcgctggatcggggtggaattgttttctgtcgccgttccctgaaccgcgctgtatttaccgacgtcttttatcagcttctctcccatttttttcgaggttaaaaactgaagaaattccatggcttctttcgggtgcttcgtttttgaggaaatcataaatccttcgggagatccggtcagtgcacggggagatcccttttcgccgctgattttcgggaaaggaaacaagcccagattgaccggttcgacgagcttaatttctgccgtttccgcataaatcatcgccgctttgccgctcgtaaactgctggcgcacgtattcgtgatcaacggagttcacgtgctttgtaaagtacggcagaagttcctgaagcttttcaagcgctttgacatagccttcgtccgtaaactccccggtttccgggctgtaatccttcgcccgcgttttttcatccaccatacgctggttcagcgtcccgatataatgagaaatggtccaaggcgcttttgtgccgaaactgatcggaatatatccgttctctttcaatttctcacagactgtgatcagttcatcccatgtcgccgggggcttcaaatgtaatgtattaaaaatgtctttattataaaagaatgatttagcgtccatttgccacggaacaccgtactgttttccgtcatgcgtaaagggtttgatttgtgactgcacaagctgtgaggaccaatctttatcctgctgatagtaagacgacagatcgagggctttatctcctttgatgaatttataagcaaaccggtcgctccatgaaaagaaaatatcaggggggctcgttgttccgagcatgactttcaccttgtctttataagaatcgtttaagaccgcttccgtttggatatgaatatccggatgagcggcttcaaaatctttgaccgcttcttcaaaatagcttttttccggctccttcggccacctgtgaaaaaacttcagggtcacttttccgtcagaggaactgctttggcttgaacaggcggcggctgacagacatacagctaacagaacgaacaggcagatgagctttttcagatgcttttcctcctttgtcaccggactataacgttatatatcattatagtccggtgaaatataatgcgcgttcttaatattcgactttccacatgtaacgccgctggcttaacggatggttccttgcttccgccagcgcatccgcatagcttctgagcacccggtttaatacgagaggagccaggtagccttttacagaatcgtcaattccggaaaaatcatatgctgccgcatcaagcacagtcagttttttgccgtatctttttgagaaggaaagcgcccgctcttcaaggggtcttgtttcgtctaagccgagcaggataataaatggaacagattcatcaatgatttcgaacggtccgtgaaaatattctccggcatgaatggcgtgagaatgaatccattgcatttccatgagaatgcagatgctgtaggagtaagcgacgccgtagttcgcaccgcttgccatcgtgtaaatgatatcttctttttcgtgggctttcgcgaatgcctttgcgtgatccgcttcttgtttaagcgctttgtcatatacggtctggagtttattgagtccgtcgatcgcctgctcaaacgcgggatggttttccagcacgtgtaaagcgccgaacacgatttgatacagaaccccgtaattcgtatttatcgcctgtgcgttctcaccccagtcatacaccgcgacatattcggcttctttcgctaacggcgaatcaggctcaaaggtcattgcaatcgtaagcgcgcctttttttctggcgaaaccggcggctttcaccgtttccggcgtattgcctgactgagaacataaaatcaccagagagttctctccgagctgaatgggattgcgctgaataaattcatttgaactgtagagatcagagctgatggctttcgcctctctgtcaaacacgtacttgctcggatacataatggctgaagaacccccgcaagcgacgaaaaagacgtggtcaatcgtttttcctttcagatcatccaagaaagcctgaaccttgtgattcacttgtgcggcagtttgactcaaatccttcactcctcagtgttttattatataatgttatataacattatataacgttatattaatcgcaacaaaggtgcgttgtcaatcatattttctgaaatttctaaaatatagaataaacccgtctaatttcccgccctttcttgacctgacccttagagacacgtttagaatgaaaagcagggagtgattcagaatgaatataaaagaagccgccaggcagacgggtctcacgaaaaaagccatcaaatattatgagcaggaaggtttaatcaccgtcagcaaaaaccctgataacggataccgtgagtattccgctcagaacgtgaatacgctgaaaatgattgccgccctccgaatgctggcactgtctgtaagcgatattaaagcgttcctcttagagggcagcagtctgcatgatatactgcgccagcagcatcaaaagctcagccggcagattgaagagcttgagcaggaacggaaactgactgaaatgctgatcaagcgcgtggaagatgcggaaaatgtcgattcaattctgcatgatatcggcgaggtcaaaatagatgaaccgaagtatatgggacttcagctgaaaaaactgttcccgggagatttcggagaatttatcgccgcgctgtttgaaccgttcctcgacttttctattgatacagatgagaaaaaaacgatatgggcaaagcttattaaagtattggatgatatggaagaagttccggctgcacacccgatgatgcagctggtcggtaaggaggacccggctcagctccaacagcacaaagtccagcatgaccaatttatcgagcggattttggagagagaccccgccacttgggacactcataaaaacatcatcattcagcttgtgaaaagagtggagacagatgaagagtacagagaaagcctgatcaagatcggagaatccgcttctgatctgcccgcgctgaaggaaggatcgcctttcagcaatctacttcaaaagctcagcccgaaatatgacacgtatgtgcgacttcagcttgaactgaaaaaagaagccgacgaggaactcggctttgattcagaagcatatttaaaacagatgcttcaatcaaaaaaacgctaaggctcgtctccttagcgttttctttcttcatcctcagtgctgtgcgttaatgcggtcaacgacattagcgatgagctgctcttttcctaaatcggaatcttcgtcaacgcttgctactgtcaaaatgatggccgctaccgcaagagcgatcgtctcaatggcggccgccgcgtttaaaaatacccatacagcacacagccatcaaataaatactgaaaaatgaactttttcacactaaaatactattataggtaaaaaagggagtgttcatatgtttttgatgaatgataaggtgctgtggggagctgtggttctcgcctttattctgtcgattgtgttttatccgtttcttcctgctgatatggccattcactatgacgtgtcgaaccgtccgaatacatcaatcaataaaacggccggcgtcctgatttttcctgtgctcatgatgatctgcatgttattcagaaaaaaggtcgttcagctgttcctcgtcgtttactgtctgctgatcgtgcatattgcagtgatgtggctggcactgtaaacataaagaaaaccggagcccttaagctccggtttttcttatttataaaatactttctcaatgttgtatttcgactgaagggtattgatcgcgtacgtttcgtaaatctccctttccatcggatcattgacgacacatacttcaattttatacacttcgtccctgtgatgtttaacaggcgacacattgtcttcaaaatgctttttgattctttgtcttaatttacgggctttcccgacaaacagcagttcatcatgaatgttataaaacataaagatgccgcctttgtctctcggaatgcggtgaaaatcaatgaaaccgtaaatcgctttaatcgccggttcattttccgacggtgactgctgccgttccgtaatcgttacatcaggagcaggaaggtttatttttatcaaaatgggtcacgtcctcttattcattaaagctccatcctatcataagaatgcgccaaaagctattttttattcaagcgccccggccggatcataaaggctcaaatcaatttccgtctgctggccgagtgcgagtttcgccagttccgcccccagatacggcccgctcgtcagccctgaggcgcccagcccgttggcaacgaggagtccgctgatattcggcactttgccgatgacgggaagaaaaccgggagtaaacggcctgaaaccgactcttgtctctatcacagtactgtctgaaagccccggcgccacagttaatgctttgtcaaaaatctcgcggaggccgccggccgtcacccgcaaatccatgccggtatcgttttcatgagtcgcgcccgctatgattctgccgctgtcaaaggcgagaatgtattgatcgtttgggggcatgacgacgggccagccgcccgtatcctctccctgaagctctaaatgaacgatctgtgccttttggtatgatactgaaaaacggatgccgagcggttcaagcagctctctcgcccaagcgccggccgttacgagaacctggccggcagtaagcgtgcgttctgcggttttcacaccgataacggcaccgtcctctgtcaatattgacgcttcttcattgtaaacagccgcgccgtgattaacggccgcgtttaacagcgccttacgaagcgccctcccgttcacccgggccgcgccgctgacatgaaccgccccgtattcctccgacagcgcggggaacagcgccttcgtttctgccggagtcagtctcgtaatgtcaccgatttcaggagcgtcctctcttcttttataagctctttcctccatttggctgagctttttttcatccgtatggagactgacggcaccgaccttttgatagccggtgtccgtttctccgtcagcttcaagctgctgtatcaattggttataatagcgggctccgccttttgcgatcgcataccatgcctggttgcggcgctgcgacagccacgggcagacgatccctgcagcggcgtcagtcgcctgccccgggtgtttcctgtcaaagaccgttacatccgcaccggcctttgcgagatgataagccgcggacgcaccgagaatgccggctccgataatcatataagacttcatgtgtaacaccttttctatctgttttgtcttatttattttaacaaatagagcgcccggttcctaccggagtcctgacggcaatgataagtttcgaaaacggaaacgtataataaaaggaatacgttcttgtctgaaagccgttttcctcaagaattgctctgtattgtgatgtattttttatatctgacacggccaatgtgccgccaggcttcagcaccctcaccatttccgtgatcgcccgttccctctcttttctgcctgaaatgttgtgtgctgaattgaaagctttcccgagcgggatggtaacggaaatcaatacgtatgagaatatttggatagttcctgtgaacttgtgcttctcatcgcagattgctcgtatgtaacgttatattgcaaagatccggacatgctcgaagccctttttcagcaggctgtacaatgcgggtttcaccgcgttgactatgttacagataagaatgatgcgagaacgggattgtctgtctggtgaaggtggtgcgttctttttatgaagcgctggatagggcttaggattcaaaatattgacaaattcgtgtgttttcaacaaaaaaatcaccccctcatgtatactgagtgcgtaacttacatatgaaaggggtatggcaatgaaaatcaatttgaagaaaaaagcaggtttttggaagaagacggcggtttcatctcttattttcaccatgttttttaccctgatgatgagcggtacggtttttgcggccgggctgaataaggatcagaagcgccgtgcggaacagctgaccagcatttttgaaaacggaaagacggaaatccaatacggatatgttgaagcgttggatgacggaagaggttacacttgcgggcgggccggctttacgacggctaccggagatgcgctggaagtagtcgaagtatatacgaaagcggtgccgaataacaaattgaaaaagtatttgcctgaattgcgtcgtcttgcgaaggacgaaagcgatgacatcagcaatctgaaaggattcgcttctgcctggcgctcacttggcaatgataaagccttccgcgctgcccaggataaggtaaacgacagcttgtattatcagccggcgatgaaacgttcagaaaatgccggactgaaaacggccttggccaaagcggtgatgtacgatacggtgattcagcatggtgacggtgatgatccagactccttttatgccctgattaaacgcacgaacaaaaaaatgggcgggtcaccgaaagacggaacggacgagaagaaatggctcaataaattcttggatgtacgctatgacgatctgatgaatccggcagatgaggacacccaggatgaatggagagaatcggttgcccgtgtcgacgttttccgcgatattgtcaaagagaagaactacaatttaaacgggccgattcatgtccggtcaagcgaatacggaaatttcactattcaataaacaaaaaaaccccgccatatggcggggttttactattaaccgatggagccttccatttcgaacttgatcaaacggttcatttcaactgcgtattccatcggaagttcttttgtgaatggctcgatgaagcccataacgatcatttctgttgcttcttcttcagaaataccgcggctcatcaagtagaaaagctgttcttcagaaacttttgatactttcgcttcgtgctccaatgaaatgttgtcgttcaggatttcattgtaagggattgtatcagaagttgatttattatccataatgagcgtatcacactcgatgtttgaacgggcgccgtccgctttccgtccgaagtggacgataccgcggtatgttacttttccgccctgtttcgaaatcgattttgatacgattgtggatgacgtattcggtgcaaggtgaatcattttcgcacctgcgtcctgatgctgtcctttgcccgcaagagcgatagagagcgtcatgccgcgcgcgccttcacctttcagaatgacagccggatatttcatcgttaatttagaaccgatgtttccgtcaacccattccatcgtcgcgttttcttcacaaaccgtacgtttcgttactaagttgtaaacgttgttcgcccagttttgaattgttgtataacggcagtagccgccttttttgacgatgatttcaacaaccgcgctgtgaagcgagtttgttgtgtacacaggagccgtacagccctctacgtaatgaacgcttgcttcttcgtcaacgatgatcagcgtacgttcgaactgacccatgttttcagagttgatgcggaagtaagcttgaagcggtgtttcaaccttcacgcctttaggcacgtagatgaaagatccgccggaccaaacagctgagttcagcgccgcaaacttgttatcagtcggcggaatgactttcgcccagtgctcgcggaaaatgtcttcattttctttcagcgcgctgtctgtgtctttgaagacaatgccttgcgcttcaagatcttctttcatattgtggtacacaacttcggattcgtactgtgcagaaacaccggcaaggtatttttgctcagcttcaggaataccgagtttgtcaaatgtctgtttaatttcctcaggcacttcatcccaagaacgctctgaacgctcagacggctttacgtaatacgtaatttcgtcaaagtttaaagagtttaaatccccgccccactgcggcatcggcatgttgtagaaatgctcaagagatttcaggcggaaatcaagcatccattgaggctcttctttcatgcgtgaaatttcttctacgatttcttttgtcaatccgcgctctgaacggaaaatggaaacgtccttatcgtgaaaaccgtacttgtattcaccaatttcaggcatttttttagccatccattttcactccaatcttttaattgccgcctttttcgccagcgactcctttttcaagtgctttccatgaaagggtggcacatttaatccgggccgggaatttcgaaacgccttgaagggcttcaatatccccgagatctattgagtcgtcatactctttcccttgcatcatgtctgagaaaatcttagacatggaaagggcggtatcaatatcttttcctttaatggcctgcgtcatcatggaagctgaagccatggagatggaacagccttccccttcaaacttcgcttcctgaacggtatcgccgtcaagcttcattgtcagtctgatccggtcgccgcaagtcgggttgttcatatcgacgacgatgctgtcatccaaaacccctttgttgcgcggatttttgtaatgatccatgatcacttgtctgtataatgtatctaaatttgcattaaaagacatttgtaaagtactcctttgtcttttggagggcttccgcgagcttatcgatctcttcctctgtattatacagataaaaactcgctctcgcagtagcagatacatccagccatttcatgagcggctgggcgcaatgatggccggctctgaccgcaatgccctcagcatcgaggacagtcgcgacatcatgagggtgaacctcatcaagattaaatgtcacaagtcccgcccgctctttcggaccgtataccgtcacgccgtccagctgctcgaaacggtcaagcgcataggctgcaagcttatgctcatgccgggaaatctcgtcgagtccgatctcttcaagaaaatcaatcgcggctcccaatccgatcgcgcctgcgataatcggcgtgcctgcttcaaatttccacggaagctctttccaagttgattcataaagccctacaaagtcgatcatttcgccgccaaattcggccggttccatattctcaagcagttctttcttgccgtacagcacgccgattcccgtcgggccgcacattttatgggaagaaagcgcgaagaagtcgcaatccaggtcctgaacgtcaattttcatgtgcggtgtgctctgcgccccgtccaccacgatgacagcgccattgtcatgagcgattttggcgatctctttaatcgggttaatcgtgccgagcacgtttgacacatgagcgactgccacgatcttcgtatggcttgtgacagtctgccggacgtcgtccagcgaaagcgtgccgtcttcctgcatcgggatatattttaaagtcgcgccggttgcttttactgcctgctgccacggaatgatattcgcatgatgctccatttgggtgatgaccacttcatcaccgggttttaagctggcgcgggcatagctcagcgccaccatattcagtgaagttgtcgtgccttttgtgaaaatgacctcagccattgacttcgcattgataaacttacggactttttcacgcgcaccttcatagccgtctgtcgctctcgtgccaagagtatgaacgcctctgtggacattggaattgtatttgctgtaatactgatccactgcttcaatgacagcacgcggcttctgggaagtcgccgcgctgtcaaggtacacgaggtcatgtccgttcacttgctgatgaaggatcgggaactgttcacgaatatcggtgatattcattattttactttcctttcgatgacggagacgagctgtttcttaactccttcaatcggaagctcttttaccaccggagcaaggaatccgtaaatgactaagcgctccgcttcttctttcggaattccgcggctcattaagtagtaaagctggatcggatccacacggccgacagatgccgcatgtcctgcagttacatcgtcttcatcaattaagagaatcgggtttgcatctccgcgtgctttttcactcagcatcaggacgcgggattcctgttcagcgtttgctttagacgcgccgtgctcgattttgccgattccgttaaagatggaagatgcggcatctttcatgactccgtgcttcaggatatagccttcagaagccttaccgaagtggatgatctgcgtcgtaaagttttccgtctgttctcctcttccgacaactacggttttcgtatcgccgtatgtgccgtctccgtagaggtttgtcgtgttttcagaaatcgtgtcgccgtcgttcatcagtccgagcgcccactcgattttgctgtctcgtccgcgcgcggctccgcggcggttgacgtatgttgtgacacctgctgacaggttgtcaacggcgccgtacgtcacgctggcattatcacctgtgaccacttcactgataatgttgaataccgcttctttcggattcaccgtgctgatgtagttctcaacgtaagtgacggagctgtggtcttcagcgacgatcagcacgtggttgaacaatgccgtgtcattgctttcatgaacgtaaacggcctgaacaggcgtctccacctgaacgtttttaggaacataaaggaatgccccgccgttcattaatgccgcatgaagcgcagtcagtttatgctcgtcgacctttacgccgtctttcatgaagtatttctcaacgaggtcgctgtgctcacgggcagccgttaagatgtccgtgaaaataacgcctttgtctttcagttcttttgaaagagaaaggaaagcaggcgtttgatcacgctgcacatataacgttttatcttcgttttcgatatcgatcagcgcttttgcttcatcagctaaatcttctaaagaagcaagcggcgcgttttctactgtatgcttgttgaactttgtaaagttccaatttgtgatttttgttttatcaggcttaggcagcggcagatcttcagctttttcaagagcctgtaagcgcaggtttttcagccaggcaggttcttgatgcttttcggaaaagcctttgacatattcctgatctacggatagtttcgtttccaatgtcatgattatccccctaacgcttacgcttcttggcctacagtttcgtcttcaatgcctagttcctgtttaatccagtcataaccttccgcttcaaggcgctgtgcaagctccgcgccgccggatttcactacgcgtccttgcatcataacgtgaacgacatcaggcgtgatgtagttcagaaggcgctggtagtgagtgatcattaagcagccgaagttttcgctgcgcattttgttgattcctttagaaacgactttaagcgcatcgatatcaagacctgaatcgatctcgtcaagaatggcgattttcggctcgatcatcataagctgaaggatttcgttgcgttttttctccccgcctgagaaaccttcgttcaggtaacgctgcgccatttcagggtccatttcaaggaactccatgttttcgtccattttgcggatgaatttcataagagaaatttcatcgccttcttcacggcgtgcgttaatcgcagagcgaaggaaatcggcatttgtcacaccgctgatttcgcttgggtactgcatcgcaaggaaaagacccgcctgagcgcgctcgtccacttccatttccagtacatctttgccgtcaagcgtgatgcttccttttgtaacttcgtatttcgggtgtcccataatcgctgctgagagcgtggatttaccggtaccgttcggccccatgacagcgtggaattcgccgccttttatttcaaggtttacaccttttaagatctcttttccttcgatttcaacgtgaagatccttgatcgttaatgttgaagcagccatatctatacctccaaaatatataatcattattctcaatttattctcattctaattttataacaaatgaaaagtaaatacaactttttatattacccggaacattcctaaagtttatcaaagatcaaggcgtaattaaagctgtttgaaacagaaaaagggcggaaatccacccttttttactgaccgattttctcattaagctgcgctgcgaggaacttgcttttttgatattcaagctccctctgccgttcgacttccatcctttttgaaagacgccgtccgtattcctcgtagccgatgccgtgtgacttctgcatcgctttttccatttcaggcgtatagtcaaggtccagtctctcgtggctggtgcagataatgaatcaatcccttcatatatttgtttctattgtaacaatgatccgctgctccggccaaagagggtgtgcccctgaatcctttcgaatgtgccggaaaccggcgctcgctttatctgaaaaacggtattcacacgattgctcattctaatgcgtcgtatgtccgaattcctgaatacactgctgcacgagggtcactccctgactgagagccgcgccgcccccgaatgccgccgcgacgctgatgacctcaaggatgttttcttctgtggccccttggtcaaggcagcccttcgtatgataaatcatgcaaaattcatcttgagcgctgatgctgatgcccagagcgattaattgtttctctttttcagttaatgaatccgctgagaaacactgctcagtaaattcattaaacttccgccccatcatgggcattttttgctcgaatatgcctaaaccttctttatattgtttcaatgcgtcatgcacgctttttccgttatcctggtattgagccactgccattccctccaatcgttaaccttcctttttattatggacagttctccgattaatacccgaaaaaaaccccggatgattcatccggggttttcgctttattcagatacgggaagcacggctccgtcgtattttttctcaataaagtctttgattttcttagagtgaaggacttccataagcgctttgattttctctgatttttcgtcacctttgcgtacggcgatgatgtttgcgtacgggttgtttttcgttgattccacttgaatcgcatcttttaacggattcagtttgttttgaatcgcatagttgacgttaatgaagactgcatcgccttcttcttcattatatgctttcgccgttaattcaggggcgatttttttgaatgtcaggtttttcgggtttttcgtaatgtttttcgtagtcgcttcaatcgtttttaccttcggatcaagtgtgatcagtccggctttttcaagcatcgccagcatacggccttgttcagcgacattgttagtcatgatgatggtcgcgcctttaggcaggtctttcagtgatttgtattttttcgtgtaaactccgaacggctcaaggtgaacggctccggcattcacgagtttgtaatctttattttctttcatttcctgttcaaggtaaggaacgtgctggaagtagttcgcatccacttcattatcagctaacgctttgttgtacattttgtaatcgttcagcacttttacttttaatgtgtagcctttttccttcaagagcggttccgcttcttttaagatttcagcatgcggtgtttttgtcgcggcgacaacgatttcctttttattcgagccgtttgatccgcaggcggctaaaactcccgcgaacacaagcagcagcgcacttaatacaatctttttcaatgtaaatcctcccttatcttttgtctattatatttgtaattacatcaccgataatctgaatgataaagacgatgatgagtataaatactgtcgctacaaacgttacatccgtattattggactggtagccttctacatatgcaaggtttccgagtccgcctgaaccgatggcgccggcaatggcggtagatccgatcagggcgatggccgtcacggtgatgcctgaaattaacgcaggcattgattcaggaatcagcactttgaagataatcgtcgatgtctttgctcccattgatctggcagcttcgatgactcctttatcgacttcccggagcgcaatttccgcaagacgggcgtaaaacggcgcggagccgataatcagcgccggcaatgcggcattcggtcctaaaatcgatccgaccagaatcttagtaaagccgagaagcagaataattaaaataagaaacggaatagacctgaaaatattaacgaccgccgcaatcacggtgttaatgattttattttcccataagcttcccttgcccgttaaaaagagcagaagaccgagaatcgctccgatgataaatgaaaaaactaaagcgatgaccgtcatataaagggtctcatatgtggccgtccacagctcggttatatcaacgttcgggaaccatttttcaaacatttgtgatcacctctgcttctacctgtttgtctttgatgaaccggatcacgttttctacttctttttcctgaccgtcaatatgaatgaataatgaaccgtaagctccgtccttcgtctgtgaaattttcccctgcagaatattgacgtccacatcaaagtttcggatcatttccgtaatgaggggctgctcggcggcctgcccgacaaatgaaagctgaatcgttttccctgtcgctgtttcctgcagaaaatgctggatggtttctttcgtctcctccggttctgtcacctgctgaacgaaacgcttggtcatcggttcgcgcgggtttctgaaaacttggagtacttcgccttcttcaacgactttcccgttttccatgacggcgactctgttgcagatttttcggatgacgtgcatttcatgggtaatgagcacgatcgtcagaccgagtctgtcatttatatcggataaaagatccaaaattgaatcggtcgtctgcggatcgagcgctgatgtcgcttcatcgcacagaaggactttcggattattggcgagcgcccgggcgatgccgacacgctgcttttgaccgccgctcagctgcgacggataagatttttctttcccctctaatccgaccagtttaatcaattcatcagcgcggcggacccgttcgctttttttcacgccggcgatttccagcgggaacataatgttctcccggacggtgcgcgaccacaaaaggttaaaatgctggaagatcatgctgatttcctggcgcgcttttctcagcccgcggctgcttactttatttaattccgtccccgcgacttccacggttcccgacgtcggcttttcaaggccgttcaggagacggattaaggaacttttaccagctccgctatatcctataattccaaatatttcgccctttttgatatcaagagtgacatcttggacagcattgacatccccatgcttcgctttgtaaatttttgaaacattttgaagatggatcaaagcaatcacccgccttacactattctaagaaatcttccgggtttctccgcaaaagaaaagcctttctgcaaaaatgagcagaaaggcttattgaaaaaggcctttctctcatctttcaaagcagaccgctttgagtgaattggcaccatttcaacattgttgatggttgccgggcttcatagggcacttccctccacctctcttgataagagaaaacatatcgtattttcgtccggaaattcttactgtagaatagcacggcgaatgataaaaagtcaataaaataaatattggaagctattgtcacatagtagattggcagttacggccgtttactgatcgcctgaaaaaatccgtttgtcagccagaggatggcctccagcttcagcagggctctgaatgatcctttcactttgagttttccgctttggataagcttttgcaaagagacatcaccatgcaggagatggatgatttccgtctggtttccgtaaaaggtcaaattagatttctcctttgaagccgacgtttttctcatttctccctgtccgttaattgagaccgttaaggcttctgtttctccttggaatgtaatcagcagcgttgaggcgtttaatagcggtttcaaaaacagatgctgtccgtcattctctgaaacttctattttctccactcgtataacctcccgttttaatggccatacatacactttctctttttaacggacagaaccctttataaaccgcacgacattttcctgtaaatattgtcacatcgggaacgtttgcgatgttttttgtttaatcagctcatataaataggaaacggagcggaaggcgtatcctttctcaacaagctctccgcctttaaacagcaaaaagcacggaacgctttcaatctgataggctttggcgaatgcgggggaataattcacgttgtttttatagaaggcggcaccgggcagcatttcttcgacgacagtaagcattttggacgccagctggcatgtgccgcaaaacggggtgtacaaatacaggagataaacgtcatcctgaatcgattcgagttcattttcttggagttctttcatgattaccacctcaggtcgttctttttcaaaaatacagtgtcagcatcaaagccggctctgatcagcacagatgcgagatgatggcccgggcacgactcgacttgcctgtatgttctgtctatataaatatggcgcgcttcgggaagctcccgtttcagctgttttcttaatttttctccggagtcatctgcgtccgttaaaatatagacgtctctgtcaaacaggcggtccgccaactcttccagttcggtttggccgatcgtcccgtttgtacagacgatttccgcgggttcgatgagcacttccctgactttgattttatcagattttccttctacgataatgaccttttcatctccgttgtacataagcgcgtcacctgccgattgttttagcgtcagattgaaaaagaaggcagtgaaattcaccgccaactgttaacaccagccattctcataatcgcaatcgacatatttcggatcgctgccgtttatgacatcggctgttttataaaatttttgattttcaaatgaaaagccctgtttgagctcgtactggtccatgcctgtcatctcgccgatggcttcattttcatgaaacaaggaaaaccggccgttttgaaagcggcccgtgacgttctccgtcacatcgaccttttgtttatcaaaagccattttagacacctcccgttacagatagagtgtccaaatggcccctttgctatccgatcagtcttcctgtgtcatttcgtcatattgctcagaagtcatgaggttttcgatttcttcagcatcagccggttccacgacgatcatccacgctttttcatacggagactcgtttacgaattcaggactgtcatcaaggtcttcgttcacttccgtcaccgttccgttaatcggtgcgtacagttcggatacggttttgacggattccacgctgccgaatggctcgtccgctttaatttcggcgccgacttccggaagctcgacaaatacgatgtcgccaagttcggcttgcgcgaaatgtgtaatcccgatacgggcttttccgtcctcaactttgacccattcgtgctctttggaataacgcatatctttcggtgtgctcatctaaatccctccatttttttcttataataagaagataccataattctttgaacctggcattacatccaatatttttcgaattggtcttctttaaagccgacagtgactttttcgccgtctgtcgtaatcgggcgtttcaggagcataccgtctgatgccagaagttcgagctgttcatcctctgacatatggtacagtttttcctttaagttcagctcgcggtatttcattccgctcgtgttgaaaaactttttgagctcaagaccgctcttttcatagaggtctttaatttcttctttcgacggagtttcctccgcgatatgtatttcgtttatttccttaccgcggtcttccagccattttttcgcattacggcacgttccgcatttagggtaccagtaaaaatttaacgacatcttcttcaccccttgtaaatgatcgtcgttattttaacacaatcacttgtaaaaacctataacgttgcttcatgaaaaagcgcccctgatgaaggagcgctttcagcatgtgatcagactgtatatttttcttcacggaagacggctgctgccgcttcacgttttttctgaatgaggtttttcggcgtcaggcgcgtcagtttgcgcagcacggaaagcatcatgcggagggaatctccttcctccatggcgatcagtgattctttggcgtgcgcttcaatgttctgaagggcttcctgggcaaagatttccgtatataacagcttctgcgcggctttttcggcaccgtccgccgcaattgctttttccgttctgaggacggcagattccaaagcatacagcgcgctgacaatatcggcaatgttcaccatgatttcctgctcgccttcaatctctttgccgtatttctgcgccgcgagacccgctgtcaagagggcgatctttttcgcctgtctgacaatgtatttttcctgttcaagaggttctgagcccggctcttcaggcatcagcatcatgagttcttcttggagcgcttttgctttttcaaagagcggcagctgaccttttacggcttttttcagaaacgtgctcgttacgatcaggcggttgatttcatttgtgccttcaaaaatcctgttgattcttgagtcgcgataggcgcgctccacttcatattcctgcataaatccgtaaccgccgtgaatttgaaccccttcgtcggcaatgtaatcaagcgtttcagaaccgcacattttgttgagcgagcattcaatcgcgtactcggcgatggacttcgcgacttcgcgtccgtctttttgctcctcttccgtcagtctgctcatattatcttcgaataagcccactgttctgtatacagagctctccatggcgtaaagccgcgctgacatcgtcgcaagcttttcctgagtgagcgtgaagcttgagatcggcgttttaaattgccggcgctggtttgcataagcggcagacagctcaatcacccgttttgaagcgccgattgtgccgacggcaagcttgtagcgcccgatattcaggatattaaaggcgatgacatggccttttccgatttcgccgagaagattttctttcgggacttccgcctgatctaaaatcagcgttcttgtcgatgaacccttaatccccatttttttctcttccggtcccgttgatacgcccggatagttcttttctacgataaatgcggaaaacttatctccgtccactttagcgtagacgacaaagacatctgcaaaggcggagtttgtaatccattgcttttctccgttaagaatatagtgtgtgcccgcttcattcaaaacagccgtcgttttcgcgccgagggcatctgaacctgaaccgggctcagttaaggcgtatgccgcgattctttgtcctgaagccaagtccggcaaataggtttttttctgttcttccgttccgaagaacacgatcggcaatgaaccgatcccgacgtgagcgccgtaagatagcgaaaagctgccggcacgtgaaaacttttccgtaatgaaggctgaactgattttatccaggccgattccgccgtactcttcaggcacgtctgctccgaggaggccgagatctccggcttttctcagcagtctgaccgaatgctcaaactgatggttttcaatttcatcgatataaggaagcacatcgtttacgacatagtcttctgtcgttttgccgatcattttatgttcgtctgtaaagtcctccggagtgaatatttgatcatatcccgtctcttcaatcagaaagctgccgccttttttgacgttgaccgtttcctgtttcatgttcatttccccctttttttaaatgagttcaaatacgccggcagcgcccatgccgcctccgatgcacatcgtcacaacgccgaattgctcgtttctccgtttcatttcatgaatgagtgacagggtcagcttcgtccccgtgcagccgagcggatgtccgagcgcgatggcgcctccgttgacgttcaccttttcttcatctatcccgagcgatctgatcacttgaatggcctgtgaagcaaaggcctcattcaattcaaaaagcccgatatcctgtaattcgagtccggcaagcttgagcgcccgcggaatggcttcaatcggaccgatccccattacttcaggcggaacgccgcctacggcaaaggaacggaatttgacaagcggggccaatccaagcgacgatgctttttcgcgatccatcagcatgacagccgccgcgccgtcacttgtttgtgaagagttcccggccgtcacggttcccgtttttgaaaaagccgggcggagcttcgccaagacgtcagccgacgtgccgggacgaacgccttcatcctgagaaaaggtaaattgttttttccgcggcttatggtcatcaccgacttctgtcagcgatacttcaaccggcacgatttcgtcattgaatttcccttccttaagggcttttgcggcattctgatggctgcggactgcaaatgcatcctggtcttctctggatactccgtacgtttcggcgacctgctccgccgtatgccccatgctcatgtaatactcaggcgcatgctccgccaaagcgatattcggccgtgtcacatgccccatcatcggaacttgcgacatggattccgcaccgcccgcaatgacggtatcacccgcgccgatcataattttttcagcaccgtaagcgatggattggagcccggaagagcagtagcggttcaccgtaatggccggcaccgtatgaggaagccccgccagcgcaccgatattccgagccatatttaatccttgttcggcttcaggtgttgcacatccgataattaagtcatcgatatttccttcatagccgcctgcccgtttcagcgtttcttttacacaaagcgcgcctaaatcatcaggacgaacggctgcaagcgatccttttttcgctttaccgaccggggttctcgcaccggccacaatgactgcttctctcataaacaccctcctagttccgtaaaggtttgcctttgacgagcatatgctgcattctcgcttgagatttcgcctcgccagcgaggcttaaaaaggcttctctttcaatctcgagtaaatattcttctgaaacctccgtgccgaacgggactcttccgccggcaatgacatgggccagcttcttcgcaatcttcatatcgtgatcggataaataacccgaccgtctcatttggtctgctccgagcagtaatgccgcacagccggtttctccggtgactttcacttttttgcgggcaggcggacggtatccgctgtcatataaggaagcagccagctgtttcgcatcgtgcagcaggtgatcctgattcatgctgatacggtctgccgcggacaaaatcttcatgtcacgggcttcgtgtgccgaaccggacaccttggcaagcgcgattgtttcgaaggttttaatcgctgcgtccatgagttcacttccgccgtccagataattcatgtacagctctttgtttcctccgccgcccggaataagaccgacgccggtttcaacgagacccatatacgattcgctcgccgcctgaacgcgtgccgccgggagacagacttccgtgccgccgccgagtgtcatcccgaatggcgccgctacaaccggtttagcgctgtatttgatgttcagcatcgtctgctgaaaacggcggatgacaaaatcgacttccatgaagttatcatcctgggcttccattaaaatcatcgcaaggtttgctcccgcgcagaaatgtctgccttggtttccgatgacaagacctttataattccgctccgtttcctcaagcgcattgtcaatcatctgaataatgtctaagccgatcgcgttgcttttcgtatgaaattccagcagcgcgacatcatcgccgagatcaaccagacttgcgccgctgtttttagtgataacgccttttgtttcttttaacgtctgcaggctgatccgtttcggattttctttcacagccctgtattggccgtctgaataataaaattgtgttccgttttccttcatataaaatgtttcatgaccctgatcaagcatttctttcacccagccggggagtgctgcgccttcttcttcgagccgctccgctgattttctgacgccgatggcatcccacatctcaaacggtccgagctcccatccgaagccccatttcatggcgtcatcaattgcttttatatcatcagcgatctcacctaaaagccgggctgagtataagagtgtttgcgatgtgatattccaaagcaggcgtccggcgcggtcatcggaatatacaagcgctttcattttgcctttggcaccctttgcctgtttggcggcttctaaagcgggcgtcttcattttcgagcgctcaccgtatgtcatggtcagcggatcgagttcatatattgttttaccttcttttttgtaaaaaccttggcctgatttgctgcccagccaattgtttttcagcatgtcattcataaattcaggaagcttaaacatgtctttttcagcgccgtcggctttatcatatacgttttttgccacatgagcgaaagtatcaagccccacaacgtcaagggttctgaaggtcgcgcttttcggtctgccgatcaaaggtccggtcaccgtgtccacctcgccgatgcggcagccggaagaaagcatttctcttaccgtgaccagcaggccgtacgtaccgatgcggttggcgataaagtttggcgtgtcttttgcgatgacgacacctttcccaagcgtgttttctgcaaatgaagtcataaactccagcacgtcaggatctgtttcctgaatcggaatgatttccagaagcttcaagtagcgggccggattaaagaaatgggttcctaagaaatgagccttaaaatcggcagatcggccttccgccatttttgtgacggagataccggacgtattgctcgacacgatgcttcccggtttccggtattcatcaacgagtgagaaaatctgtttttttacgtcaaggttttcgacgacgacttcaataatccaatcagcatccttcaattgagctgcgtcatcttccaaattccccgccgttatatagtcgagattggcagccgaagtcagcggcgccggtttttgcttcagcagcttttgcatggccgatcggctcagtctgctgcggacctccgggctttctaatgtcagcccttttttcatctcatcctttgtcagctcgtttggcacaatatcaagcagcaggacgggaattccgatgttagccaagtgcgcggcaattccggaccccatgacgcctgatccgagaacggctgctttctttataaacttgtgcatgagtcatcccccttgaactttgaatgaatagtcattcattttttcggcaaaaaaaatgaaacccttttcttctttcatcttaaaagattttcaggatgacttcaatagcaaatatggaatttttttaaatttttcggcttccgcatgttccatggcgcgggcgggaaacttaaacccggaggtgaagggaatggtgcgagggagaaaagatccgtcttctgccgcagtgagcgcggccagcatgaaaggaaatgcgggaccgaagcaaaaatacggcggcggcaaacggacgagccaaaatcagcaatataaaaaagacaacatggaataacatactgcggctgctttttggagcagccgttattttttgaagattcctttcagcacaaacgccgcatttgccgggcgctcggcaattcttctcatcaggtacccgtaccaatcggttccgtacgggacatacaccctcatcctgtatccttcttcggcaagctccttctggcgctccgttctgatgccgtacagcatttggaattcaaactgctcccggggaatctgatgctcgctgatgagtgttttcgtatacgaaataatatcgtcatcatgtgtcgccaccgccgtttcatagccgctcaaaagctgcagcttaatcagctgctgaaaatgaagatcggttgcttttttatcagggaacgcaacggccgccgattctttataagcgccttttacaagcctgagccgcggcttatatggcatcagaccgctgatgtcttcagctgcgcggtataaataagcctgaatgacggtgccgagcatcggaaaatccggcttgcaccgcttatacagctcaagcgtacggccgcatcttgaatagtcctccatatcaatcgttacaggcacgccgcgttcttttgcctccgtcaatatgtctctgacatgctgttccgcgagttcctcggaaatatccagaccgatggatgttaatttcagcgacagctcacaatccagttgattctcggcaatcgccctgattgcttttttacattcttccgccgtctttttcgcatccttctctgaacccgcatattcacctagataatcaatcgaagccgacagccctttttggttcagccgctttaccgttttcacagcttccgtgagcgtttcccctgcaacgaaccttcccgcgccgaagcggattccgtaagcctgggcgaattttgtaagcattttatttttcgacaaaaataaacatatgctccgcagcaaggatgaactccctcctttttcttttattcgtgtatgaatttccgatcgcagagaaagctaaaacacaaaagccatgcagattgccaagatatcattcatatatccatacagactctgatgtcaaagcaatgtattatattatcaagatattcaaacggttttaatgagtcacaaaaaggatcaataaaaatcactacttcttcaattgagttttcgagctataattccgcttcttcgttacatttcgcccaaaaaaacttataatttatatttctttatccccttataatttgaaaatattccttaaaagataattgatttataatttacaatggcttatatttaaaattgataattcagtttattgaacgtatctattaagaaggaaaagcagaatttcaaaatgataattctgctgaatttatctttgcctcacaaacatacctccaaagcattattatttctttctaatagctttacgatccttcatctttaaagatggcttctcttccctaacggaatttaaagaagggacctgcctgagttatccattcaccttattttgaagaatcactaagctcgaaacatatgaaaagagggaaccttcaattggattcaacaggaaaatctaaacgtacacttttattaattggacttattatagctatgtttttttctgctctggacggaacaatcgtaggaacggttatgcctaagattgtaggagatctcggcggcctgagcatgatgacttggctgactacggcctacctattaacatctacctccatcgttccgatcgctggaaaacttgcagatctattagggcgccgggcagtatatgtggccgggctgattatattcatgattggctcttcactgtgcggcctggctgataacatgaaagaattaattgtgtttcgaggtttacaaggtcttggcggaggcattatgatgccgatggctatgattgtcattggagatttattcacaggcaaacagcgtgccagatttcaaggcgtatttggcggtatttacgctcttgcttctgtaatcggtccgcaaattgggggatggattgtagattctttcagctggcattgggtattttttatcaatttacccgtgggaatggtagctgtgttctttattgcgatgggattgcaggccagaaaatacacgggtccgattcattttgacttcatcgggatgtttacaatgattacgggtgtagtctgtttgctgcttacactcagtttcggcggaaaagaatttgactggttatcatggcagacattttgtctgttagctttggccactataagtattattagttttgtatttgcagaaaaaaaagctgcagaaccaattctgcctatacatcttctaaaaagcagaacttttatcttcttaaatttaatagggttctttatgagtattgggatgtttgcagcaatcaccttcgtccctttcttcatgcaaggaataatcggcatgagtgcatcagagtccgggacaatcatgatgccgatgatggtcgcaatgattatctccagtattataggcgggcagctggtctttaaaatcggcattaaagcgcagattatcacggggatggcaatcatatcctttgcctattttttattatccacattagaagctgacaccagcaaattaactgcaactacttatgtagctatcatcggcttcggtatgggccttgttatgcccattattactctggcacttcaagagagtttctctaaagaaacgctcggcgtggttacttcgtcaagccaatttttccgctctatcggaggtacgtttggaattacgattctgggagcagtgatgaatgccaagtcaggaaatatattaaccgataaattagttccttttttagacaattttccaaaacaagaaaacgcattagcagctcatctcaaagacttgatcagcagcaatcctcaagtcctgctacagaggctattcagttctggttcattcgaacaatttccgcattctatagcaaagcacatcataccgataatgaagacagcgttaatggactctcttcgcagtgtatttttcgcagggcttatactattaattgccggagtattttctgcttttcttttaccaaaaataaaaataactgaaagaaaagccggcactgatctagacaataaaccggcagctgaagtccaatcctagtgccgctgctgactttcgcatatatcgaactgttaacatgaacagacattatccgaaggttttttcttctgatagtgtctttttttattgtaaatattgatgtctctcctgcaaatcgtggttattttaatttatctgtatgaaatcccgatcgcagagaaagctaaaaagaacagaattgaaggaggcgtttatatgaacaaccaagagcagcacggaaacttgccgcctgccgtcatctcaacgaaagaccatttgtatcttgaggacatgctgaactggaatctgcttgccatgaaaaaagcgcattttatggcggaacactgccagaatcagacgttaaaacaagagcttgatcagatcggccggatgcatgagaagcattatcagcacatattgggccgcttgaaccccggtcaaggcggacagacaacaacaggctatatgcaataggaggacaatacatggaacagcaaaatcaaaaaatcacgaatccgcaaacgcccgtgcccaatacggcgcaaatgaatgacagagacttggtcaatgagctgctgacgacggaaaaatacatcacggcttcatattgcacagccctgcacgagttcagccacgagtctctttatcaagatattcaggcgattttcgatgagtcacaaaaagcgcaaagaagattatacgatgtgatgtttcaaaatggctggtattccattgaagccgccgatacccaaaagcttcagcaatcgtatcagaagttccggcagaccattcagcagcagtctccctaccagcagtaaaatgaaaaaggatttgatgttttcgccaagcatcagtcctttttttatttttgcacaaaaagattgacttatcattaatccttatttatatttaactaatgttaattattttctcaaggaacaagatgaggaggagttatgaaaaacgcggatcaatatgtgtctgacatccagaaatctcttcagacgctgctgcaaaacatacagcctgaaatggtggaaagcatggcaaaacacgaggtgacgcctgcccaattatttgttttagccagcctgaaaaaacacgggagctgcaaagtttccgaaattgcggaacgcatggaggtaaagccgagcgcggttacgctgatggccgaccgcctcgaacaaaaaggacttatcgtccgcaaacataaccagcaggacagacgcgtcatcgacatcagcctcaccaaaaaaggcgaaacaaaattcgaagatgttgtggaaggacggaaagcgatactggcgcgtaacctgtccgttctgactgacgatgaactgattcagtccgtgaacatcatccgcaaagtagcggaagccgccgagaaatacgcggctgatcaaaaagaaaacgaatagaaagaggagctgccgaaacatgagcattgaaaagaaagatccaaaacgcacattattaataacgggcttaatcatcgccatgtttttctcagcccttgacggcaccatcgtaggaacggcgattcctaaaatcgtgggtgacctcgggggattaagcatgatgacgtggctgaccacggcatatcttttaacttcgacgacgatcgttccgattgcggggaaacttgcagatttattggggcgccgcgtcgtctatgtgtcaggtttattgatttttatgggagcttccgcactgtgcggaatggccagcaacatgacggaactgattattttccgcggacttcagggaatcggcggcggtgtcatgatgccgatggccatgatcgtcattggggatttgttcacagggaaacagcgtgccaagttccaagggcttttcggagcgatttacggccttgcttccgttatcggcccgcaaatcgggggctggattgttgactcattaaattggaaatgggttttctatatcaacctgcctgtcggaattttagccgtgatctttatcgcaagaggacttcaaggcagaaaacagactgggccgattaactttgacatcgccggcattttcacaatgattgtcggaatcgtcagcctccttctcgcgctcagcttcggaggaaaagattacgcatggggctcttggcagattctcggtctctttgcgcttgcgcttgccgggattgtcggattcattttcgctgaaatcaaagcaaaagaaccgattctgccgatgtacctgtttaaaaacagaacgtttaccgtactgaatctgatcgggtttttcatgagtatcggcatgttcggcgccgttacgttcgttcctttctttatgcagggaattatcggagtcagcgccaccgcgtcaggcacgattatgacgccgatgatggtatctatgattatcacaagtattatcggaggccagctggtttataagatcggtattaaaccgcaaatcatgatcggcatgctgatcatggccgtcggcttcttcttattaacgaccttacagctggatacaagcaagctcgcggctacgtgctatatggcagtgatcggtctgggaatggggctcgtcatgccgcttctcacactcgctctgcaagaaacgttttcaaaagaagagctgggcgttgtgacttcatcaagccaatttttccggatgatcgggggaacgttcggcattacggtgctcggcgctgtcatgaatgccagatcaggaagccttttaaccgacagactggtgccttacttagactcactcccgaaacaggcaagtgcctttgccgcccagtttaaaggtatgattgacaaaaatcctgaagggctgcttcaatccttgttcagtcaggaatcgattaagcagatcccggccgcattttcttcccatatcgtgccggttttgaaaacgtcactgatggattcgcttcacagcgtgtttttcacaggcctggcctttatcgctgccggattgatcctcacgctgtttgttaaatcaattaagctgacaaacaaaaagacaggcaaacaagaagaaaaggcgaaagccgtttaacaaagaaaaatcccgcggatgccgcgggatttttttatatcatctgggcctctccgtttccgaatgaccagtcttccgcctcattggaaatcgggggtgaaaattatttaataaaccttaaacatttcatagttatctttatagtacgacaaaataaagtcacgaaaatttcttaccgaagaagataacagcttatgtttcatccaagataagccgactggatatgaagcagagtgatcagtcacttttataaaattcagccccaatgttctgcaaaccgaaataggaagcaacgccaccccctgatccagctttataatctcggccagtaaatgagaatccgcctcaaatgcaatatttggggtgaaaccggctttttcacaaagcgaggctgtaaaaccgctatactcttcattattagcaagggtaataaatggttcatcggcgacaagacgtaaagaaatttcggttttacccgtaaatcggtggtttgagggcaaagccagaacaatatcttcatttaccagcatacaactttctatctcttcatcttgaataggatgacctgttattcctaaatcaatgtcccctttttttaaacttgttaggatcccgcttttaactccgatggcttggagaatttttgattgaggggagcggttgatatattcactcatcagtcctgcaaggaatctcggattagaaatagatattctgatggtgtcagacatttgatgttcctccaattgaatttccgtttgtgcattttcaatctcagtaaaaatcctgtttacatgttttaaaagaattttccctgatgaactcagcttaatatttctgccttttctctcaaacaaagctgttcccagttcattctcaagtctttttatagtgagacttaaagaaggctgggcaatctttaattgttctgctgctttagaaatatgctcagtataggcaactgtctgaaagtattttagctgcagcaattccatctgtctgcatcccccttatttatttcaataaatatatatataccttattatgtattagattaaatgtaaatgcggatgtaagataatagcatagttaaagaaaaggaaagggtgtcatgcaatgaaaattgatgtgaaagatatagcaaaaaatttaaatacaccgctaacggctcctgcttatcctatcccaaattataaatttgttaaccgtgaatatttaaatattatttaccgaacggatgaaaaagctttgcgtgcggcagtgccggaacctcttgaaattactgaacctttagtgaaattcgaagtgatgcggatgcccgatgtttccggacttggtgcctatacagaggcaggacaagtcatccctgtcagctttaatggtgaagaaggagattatgtacactctatgtatgtagacaatttcccggctattgcaagcggacgggaacttactgcatatccaaagaaattgggcgcccctaagctgtatatagactctgatactctcgttggcacattagattatggcagtcttcgtgtggcagctgcgactatgggatataaacatttcgaaatggacaaggaaaaagcgaaaagggaaatttgccgacctaattttatggttaagattgctactgattacaatggtgatttaagggtttgcgatttggtgcgcacgcaaataacgaatatagaagttaaaggtgcctggtctggaccggcgcggcttcaattatttgaacatgctctggcgcctcttgcagatttgcctgtattagaagtcgtttcagcatctcatattattacggatttaaccttaaatgcagcacagccggtttataactacttagaggaaaaataaggagacgtttacaatgagaattgcaattttaggagcaggttctttaggaaccatagttggagcatatctgtctgctggcggaatggatgtcgaattaattgattcatacaaagaacatgtagatactttaaatcaaataggtgctaaagtagttggtacaacggcatttcaggcaaaggtaaaagccattacccctgaaaacaagtcaggcaagtatgatttcatattgctcctgacgaaacaattatataatgactccattcttaaagagttactgccttttttaaaggatgatagtgtagtatgttccttgcaaaacggtatacctgaacagaaagttgcttcgatcgttggtggtgaacgtgttattgcaggttctgttgaatttggtgctacgtttattgaaccaggcgtatccagacttacaactgagtatactcaatttaaagagtacgcttttcaaattggagaattaaatggtgaaacaacagaaagaatccagcgtattaaatcggttttagaccttatcggcggaacacatatttccgataatttagttggaacgaagtggtcaaaattacttatcaataatgcattcagtggtttatcggcagcattaaacggagaatacggtgatattcttgaccatgaaatcggcattgtcagcgcagttcatatcgcagatgagacgattaaggttggacacgccaatggtgtcacatttgcgaaaatgggcggccttgatttagaatctttggaattaaaaagtgaaaatgagattcctgaacgtattcaaacatttagggcagccatggaaccatccaggcttttaagagcaagtatgcttcaggatcttgagaaaaaacgcaaaactgaaattgattatattaatggagttattcccaaaatggcagaaggtactggaatttcaacaccttttaatgatttggttgtagcacaagtcaaatgtgccgaggaatctcaaacagtgcccaattttgatacaaatataaaagcatttgaagagttattacgtatccgaaaggaaatgtgatatataggaaagagtaagggattgctgcggcggtccttttttcttggttcagcaagtaaacaaacgggtgtgttagttacattaaagttcttcgttatgaattgaacggcgcctttattgattccttttcagcaaaaaaagcttccggcacctctctttgatgccgaaagctttttattgtttttttctgtgagcttcattgagctgtttaatgtgctgtatcgcagctttgatgccctctttggcgtccgggtaggattgattccaatgtttgacgagcggcggcatgctttttgcgatatgtgtatacaaaatccactgcctgacttcttcctttacatccgggtttgtttcgccaagcaatagttcagtgtatttctcaagcaggccgtccagctgctgctgcagtttttcttccataccgtttccttccctttttcatgattatgacaatcgggcggtgagggccgcttcctgcacgatacatctgccgcgtccgtgcggaatgcaaagcggcgtgccgaacagcggatcttgcgttacctgacagttcattgcaaagacctgctgtacaagctcgcaagtgatgacttcttcgggacggccctctgcgtaaatctgtttatcctttatggcgaccagataatgggcataacggcatgccagattgagatcgtgcagcaccatgacgattgtgcgtttttctttttcatttaattcaaacagcaaatcaagaatttcaatttgatgcgtcatgtcgagataagtcgtcggctcgtcaagcagaatgatatccgtatcctgagcgagtgtcatcgcaatccatgcacgctggcgctgtccgcctgacaaggaatccacaggacggtcggccatttcctcaagcttcgtcgcttttagcgcttttgtgactgcgtcttcgtcctctttggaccattgcttcagccagctttgataagggtatcttccctgcttcacaagctgatgcaccgtcaggccttcgggagctgacggactctgcggcaaaatagcgagctctcttgccacttccttcgtcggaagcttagcgatggcttttccttctaaaagcacagaaccgcccctcggtttcatcagccgggccaatgaacgtaaaagcgtcgattttccgcagccgttgcttccgatcaatacagtgatttcgccttttggaatcgcgacatccaattcgtcaatgataacagtctctccgtaccctaagctcagcgtctctgtagaaattgcactcataccgctaaccgctccttttttgagtttcccaacactatgtatataaacaaattgcctaaacattcaacgtgagatcatgattatattgtaacagaaattaatgactctgaatatcattatcaattagttttgggtaaaaaagcagcgggcggcggttatttttttatttccgtcattactccatcgttctttttcagttttagataaaaatggtcatagcggctgtccaaattaaaagccgaaagcacctcccggacgacctcgctttcctgcatccggccgtttacggcaagttctccgaggatcatcttcatttcatcaagcgcttcctcgccctctctgtgaacccctgagagcttgtcccggatgtccgccttttcatgaccgctttttctttcatacaaaccttcatagcggttatgctctccggctccgtagctgacgcgcagggaaaagctgctgtaaggaaccggcttctcggatgacacaggtgtgctgtcttgttccgcttcccgtttttcttcattcaatcggcagccggcaatcagcatcagcgtaagacataaaacgcccgccgttctgatccatttcatgcgattcactcccattccattccgatcgtttttaggtatttccaagggaggcggctgtcattcacggaacaaaaaagaaccggagcggtaacagctccggccggttcatctccagattatcattcagtcagctctaaaaattcctgcacatcctgtacggcaaggcggaccgcgtcttcccaaaacgaccgttccgtgagatccgctccaaggtgcttcatcgccaaatcctcaacggtcatcgaagccgtgtcacacaaaagcgcgatatatttttcttcaaaatccgctttttcccgaagagctcttgcatatattccaagcgaaaataaataaccgaacgtgtacgggaaattgtagaacggcactcccgtaatatgaaaatgcagttttgacgcccagaaatgagggtggtattcccctaatgaatcgcaaaatgcttctttctgcgccgcttccatcagttcattcagtttctcagccggaacgacgccctgcttgcgctcttcataaaaacgcgtttcaaataaaaatctcgcatgaatattcataaacatggctacgcttctttgaattttatcttcaagcaagaacaccttttcatcctttgtctccgcttgtttcaaagcggcgtcggcgacgatcatttccgcaaaggtcgaggctgtttcagccacattcatagcgtaggctctgttcagctgccgcacttggagcatggcctcctgatgaaacgcgtgaccgagctcatgcgccagcgtcgatacgttcgaagcgcttccggaaaacgtcataaaaatccgggattctccgctgtcgggaaagctggtgcagaaaccgccgacccgtttgccgctgcggtcttccgcttctatccaccgatcgcggaacgctttttccgtgaatgcggacagctttttgccaaacgtcgaaaattggctgacgatcagattagccgcttcatcatatgtgtattctttcgaagcctcgccgatcggcgcgcccacatcataccagttcagccgctcaagccctaaaagagacgcctttcgattcaggtattcggcaaaaggctttttatgatcggtaatgacctgccacatgacatccagcgtttcttttttcatccgattgatcgcaagcggctcttccaaagcgcttttccagccccgcgctttatagatttccgtgcggaagccggccagatggttcagcgtgctgctgaaaagctcctcttctcctttccaggcttcattaagctctttgaacacttgacgtctgatgcggcgatccgggtgcgccatcatattttccgcttggccgaccgacagctctttatcctcaaacggaatcttcattctgccgacagccgcattatacaggtcgccccatgcgtgatagccgtcaacggccaggccttcaatcagcctttcttctgaagcgctgagcttctctctgacccggtctcttctctcatttaaaacatatgtgagatcctgaagttccggtttttgcaggagctcctcccagacccgctcgtcaatccgggcaagtgtatcgtcaagggtgaccagagcggatttaaaatcactgctcagctgattgatccgcgctctccattcattcgctttctgatcatgagtgttctgagcctgaagacagccgacgaacgctcccgcctgcctgatcatgatcgctgaccgttcaaacctatcaatcagattgatcagctcccggctttcatccgcgtgcgtcggaactgtaaatgcttcaaccgcatgttgaaaagcgcttagatgctttttgagctcttgtatgtattgctgaaactcttccgaccggctcccgccctcaaaaatggagtttaaatcccatgtttccttcaatccctctaatgccatcttttctttacccctttctatccgaagctgactccattataaaacaattctgacatatttccgaacgatttctccttctttccgcgagatgttatacactatgagataagaacaaacgacaaacggggaggattataagatgaacagaaaagttgccattgtaaccggtgcgacgagcggattcgggatgctgacagcgctgaagctcgcccggtcttatcacgtcatcgcaacagccagacagccggagaaagctgtaatactgaaagaggccgccgctcaagcgggtgcatccgcatatattacggtcgtttctttagatgtgacaaatgagcagtcggtgtctgacttcgggaacaccatcagcggtttcggaccgattgagctgcttgtcaataacgccggcactgcgtacggagggtttattgaagatgtgctgatggaacattacagacagcagtatgaaacaaatgtattcggtctgattcacgtcacaaaaaccgtgctgccttatatgcggaaacatggcggggcgaaaatcttcaatatcagcagtatcagcggactgaccggtttcccggctctatctccgtatgtctcttccaagttcgcggttgaagggtttacagagtgtctgcgcctcgagcttctgcctttaggaattgatgccgctttaatagaaccgggctcctataaaacgtctatttgggagacgtctctctccagccatattacggcgcccggcaaagactcgccttattatcgcttttatcagccccttgaagcttacttcaaagccaacgcatccaaaagcggcgatcctgatgacgtagcggagctgatttatcaattggcacaaaggaaacggctgaagaaactgcggtatccgatcggcaggggcgttaagctgacattggctttccgctcactctttccgtggtccgcttgggaatcgattataaagaaaaagctgttcacttaaactaaattataataattataatttagtattgatttttatttgatacgtgatataattaaattaacagatcacagggaggacgatgaatatgaatacacaaaacgcgaaaaaaactgaaactcttgttgagaaatcaatgaacacacaattatcaaactggtttatcctttactctaaactgcaccgcttccattggtatgtaaaaggccctcacttctttacgcttcatgaaaaatttgaagaactgtataacgaagcagcggaaacggcggacgccatcgcagagcgtcttctggccatcggcggacagcctgcggcgactttgcacacttaccttgaacaagcttccattacggatgaaggtcaggaaaaaacggcttctgaaatggtgaaatcactggttcaagactataaacaaatcagccgcgaatcaaaatttgtcatcggcatcgcagaggaacaaaatgacccgtcaactgccgacctgtttgtcggattagttgaagaagcggacaagcatgtgtggatgctgtcagcctacttgggagaatgacgaaaaaagctgaacctcagttgaaggttcagctttttttatgcgctcagcttgcgctttcagtttgtttcgttaatgtgacgttcagcgtctttttgcttccgcttctgagcacttgaacagtcgttttatcgccgattttcagctggttatataagatctgtctgatatcggcgctgctgtcgacatctttgccgttcagttgtacaatgacgtcatttgatttgatgcccgctttcgcagccggtgagccggattgcacttcttttacgtaaacacccttagacagctggtcgccgaacagtccgagcgtgttttcctgataggtttccggaacttgcgccatgtcaatcatctgcacacctaaaaacgggcgctcgacttttccttttgcaagcagctggtcgactatcggttctacatcattgctcggaatggcaaagccgagcgactccacgccgttttcactgactttcatgctgttgatcccgatgacctggccgcttgagttgattaacgggccgccgctgtttccggggttaatcgccgcatccgtctgaatcacgttcatttccaccgtgccttgggatgtatcggcgtccaccgttctgttcagcccgctgatgacaccttgtgtgacggtgccggaaaactgctggccgagcgggttgccgatggcaatcactttatcggcaatgcggagcttggaggaatccccgaagctggccgcttttttgacattggacgagctgatttccaatacagccaagtcactgatggcatcctttccgacaagctttgccgtttcggttttcccattgtaaagagtgaccgacagtttgttcgccccttctacgacatgattgtttgtaatgatgtacgctttttcgccgtcttttttgaagatgacgcctgaccccgtgccgctttccgtttcagagcttgaaccgccgtcaagtccgaactggctgctttgcgaagcttggtagttggacactccgacaatcgcgggctccaattcttccaccatatccgctacgcttgaggtatttttcaaaggcgttgacgtaaaattcgaagactgaacttgtttcgtatcagaaacggcttctgtcttatgctgctcacccggcaggttcggcacaatgccaagcacgaggcctccgccgataatgccgcctaaaatcgggctcagccaagcggctctccgttttttttcttttttcacggcagccgttttttcaaattccgtaccggcagccgtctcgttttccggttctttcgagacggtcccttcaagcagctcgggctcctgatggctgatctgctgctgttcatttctgttttgttccgtatgtgaaagatctgactgatcgcggcttctgccgtcatctcgatgatcgttcatattcacgcacactccttcagcatgttttcattctatcgattacatattcatcgcatgtacaagttctattgtcccaataataaggagaaaagcaaagctccaaaacaaaatgtgtttgaacatgttatcttccccgctttttttcttcctttcttcccttatacacatcataaacaaacattgtgggataaaaatgaaaagaatatgtgaaattatgaaaatgcggcttgagtatgttaaaactagtataatgacgttgaaaggatgtgaaatgccttgtcatacaccatttatctagttgaagatgaggataacctgaatgaactgctcacaaaatatttagagaatgaaggctggaacattacatctttcacaaaaggcgaagatgccagaaagcagatgcagccgtctccccacttgtggattcttgacatcatgcttccggatacggacggctatacattgataaaagaaataaaagaaaaagatcccgatgtgccggtcattttcatttccgcgcgggatgccgatattgacagagtcctcgggttagagcttggaagcaatgattatatcgccaagccttttttgccgagagagcttattatacgggtccagaaactgctcgagctcgtgtataaagaacagcccgccgcaaagaaaaccggcatcaccgtttcttcctacaatgtgatcgaagatgcccgggaggtttatgatgaaaccggcagcctggtcaatttgacgtctaaggaatttgatctgctgcttttatttcttcaccataaaggacaccccttttccagagaagatatcctgctgaaaatatggggccatgattatttcggcactgaccgggtggtcgatgaccttgtgcggaggctgagaaaaaaaatgcccgggttaaaggttgagaccatttacggattcggctacaggatgatgacgtcatgaaaaataagccgcttgcttttcaaatatgggtggtcatctcaggcatcctcttagccatctcgattctgcttctcgtgctgttctcaaatacgctgcgtaattttttcacggatgaaacgtatacgaccattgaaaatgaacagcatgtactgacggagtaccggctgcccggatcgatcgagcggggatattacagcgaggatgcgaccgctccgacgactttccgatccgttcagcacgttcttctgccggagcgggaggaatcggccagtgacaaagacttgaactatttttcttcttcctttatccataaggtgtacaagctcgcgggccgccagcacagcgtcacgaaacgatacagcgcggacatcagcggtgaaaaagtttttttcgtcattaaaaaaggcctcaccattaacggccaggatgcgatgatgctgtcttacgcccttgattcttatcgtgatgatctggcattcaccctgttcaagcagctgctttttatcattgccggcgtgattttgttaagctggattccggcgatttggcttgccaaatatctctcacgcccgctcgtttccttagagaagcatgtcaaacggatttccgaacaggactgggatgatccggtcatcgtcgacagaaaagacgaaatcggaaaattaggccataccattgaagacatgcggagcaagctggtgcaaaaggatgaaacggaaagaacgctcctgcaaaatatctctcatgatttaaaaacgcctgtcatggtgataaggggctatactcaatcaataaaggacgggatttttcctaagggggatctggaaaccacaattgatgtcattgaaggcgaagcagaaaaacttgagaagaaaattaaggatttattatatttaacgaagcttgattatttaatgaagcagcgggtgcaccatgagacatttgacattgtgaaggtcacggaagaagtcattgaacggctcaaatgggcccggaaggaattattgtggagcgttgatacagaagatgcattaatgatgcccggtgatccggaacaatggagcaaacttcttgaaaacattcttgaaaatcaaatccgctatgcagaaacggcgattcacattcggatcagccaaaatcagcagcagattgtcatgacggttaaaaatgacgggcctccgattgaggatgagatgctatccagcttgtacgagccttttaataaagggaagaaaggcgagttcggcataggactcagcatcgtaaaacggattttaaccctgcataaagcatcaatttcaattgaaaatgaccaatcgggtgtaatctaccgaattatcataccaaagtagactgtagtgtttcattgcagtctttttttatgtgaaggaatagccgttaaaatctctgtagtttgctttcagcggtttttggcattgatgaacccatttcttttcacaaattgtctttttcggatatttcaccttttcgactttaattcctctgtttcgcaagcggctgatcatttcatctaattctttcattttcagattcaccctttcgccagaactttgaccattcggtcagctcactttataatataaataaaacaaaacaaaaaaacaagttacaatcaggttaaatttacggaatatcaatatgaccatatagtcatacatgagaagcacaagccagcctcctggctccgaaagggtggaaccattgaaggaaaaagaaaagctgatcattgaagcagcaatcaaactgtttgcccgaaaagggtacaaatctacatcggttcaggaaatcgccgatgaatgcaaaatctcaaaaggcgctttttatctttactttccttccaaagaagcactgctcctatccatgctgaattactactatgataaaacgtttacccgaatcacgacgatccaaacggagggtgacagtccgagagccgcttatcaaaaacagcttgcggtgttttacgaatcgattctcgcccatcaggattttattaccatgcagatgaaagacggttcacttccttataccgaagaagcggcgcagtgcggaaagagaatccgccggtcgatcctgcagtttcatatcgacagtcttcttgctgtttacggagaaaaagctgaaccatacacagccgagctttgttttttaatagaaggaatcagtcagatgtatcttgaatatctcattctgaccggccggtccgtacagccttcgcttttggcaaataccgtgattcacagaattgatgacatcgtaaacggaatggcgggcagacatgatgaagcatttatttctcttgatgaggcaagctcactgtttgggccccttcataacgggcagcccgatcctttaagccaatcgatcttgcagaccctccgcacgcgcatcggcacgatggacaaggcggaagcatctgaattcaccgagagcttggatattctggaagcggaaatgaagaaaaagtcgccgaaaccggcaatcatcaaaggaatgattttgaatttgaaggaatccgacctgctggctgaagatgcagaacagctcagatttttactgaaacagcagtttatttagaagaacggccgcaatgactgcagccgttctttcttttatgctttcgggtgcaccatatcttccggacgcaccatttcattaaattgttcttctgtcagaaggttcagctgtaatgccgcttctttcagtgtcaggccttctttgtgggcaagcttggcgattttcgcggcgttttcataaccgatgtgcgggttaagcgccgtaacaagcattaatgagttagagagattttcctgaatcgtctcttggttcggctcaataccgacagcgcatttgtcatggaaggaattcattccgtcactgagcagctgcacggtctgcaggaagttataaataataaccggtttgaagacattcagctcgaagtttccttggctggccgcaaacccgattgtcgcgtcatttcccatcacttgcgcggcgatcattgtcagcgcctcactttgcgtcgggttgactttgcccggcatgatagagcttcccggctcattttcaggaatgacgatttcgccgattccgcagcgcgggccgctggccagccatctgacatcgttggcaatcttcatcaggtcggcagccaatgcttttaacgcgccgtgaacgtaagtgatttcatcatggcttgtgagcgcatggaatttgttaggcgaactcttgaatgtctgccccgttacttttgtgatttcttccgcgacgaattcaccgaactgcggatgggcgttgattcccgtgccgactgccgtgcctccgatggcaagcgcgcggattttttccgttgactcaagaatcatttctttcgaacggtcaagcatgtatacccagccgctgatttcctgtccgagcgtcagcggagtggcgtcctgcaaatgcgtgcgtccgattttcacaatatcctgataagctttcgctttttcatcaagcgtcgcgcgcagctgatcaagcgccggaacgagctgctcatatacggcaagaaccgccgcaacgtgcatcgccgtcgggaatgtatcgtttgagctttggctgcggttaacgtcatcattcggatgaatcttcagctcggaatttttttctttcaataaagcagtcgcgcggttggccaccacttcattcatgttcatgttgctttgcgtgccgcttcccgtctgccagacaacgagcggaaagttatcgtcgtatttgccgtttaaaacatcgtcacatacagcggcaatcgcctgggctttttcagactctaagttgccgaggcgttcgttggcgatcgctgtgcttcttttcaatattgcaaacgccttcacaacacgctgaggcattttttctgaaccgattttgaagttctctttgctgcgctgtgtctgagcgccccaaaatttatctgccggaactttaacttctcccatggtgtctttttcaattctgtagtccatttatgtatccctccataacagttgcttcaccctgagtattattcgccagtaacagatgaaaccctttttatttttcggccttggccgtttttaatttcagctcaagatagacgcgcgaatccttagagtatttatacttcggatttgttttacggtattctttcgacgtgtaagccacttcgtaatgcgcttcaaatgatttgatgagctgttcaatttcttcggcatttcctgccagtctgacttgtgccacatctctcctccgctttcataaaaaaacttgtaccattaaatactttatcatagtatatcatttttttaacaggaaaagataacctcaattaaggattggaaggcgggtgactgtcgatgacgcaatcggagttcaaggaatacatacacgttaatctggcactggtgcttccccacgtagagcagaatgatgacctggttcaaaataaaaagatgcttccgaacgggcttgttttttattatatgtatctgagtgaaatgaacgacgaagacaaaataaaagaggcgattgaaacgctgcttcaggaggaagacactctgacgctggatacggtggcgaaacgtcttgataagatcaacgcccgtcccgtctttacgtcgaaggaagccgtcatctccattctgcggggaaaatgcgccgtgtttattaacggacttgacagcgtatacattttgtccacgggaaaaagagaaaaaagaagcgtaaatgaacccacatccgaaaaggtcgtaagaggtccgaaaatcgccttcatagaagattctgatacaaacatcgccatgatcaggcagcgcacgaaccatccgaagctgaaaacgaaaaaggttccgatcggagaaaataagttaaaatacgccacggtcatgtacatagatgataaggcggacccgtctgtcgtcagcgatgttgtaaagcgcctcagcaaagtgaagatggatgacatccaggattccggaacgcttgaggagcttattgaggataataagtattcgccctttccgcaaatacaaaatacggaacggcctgataaagtctcttccgccttgttcaacggccgcgtcgccatccttgtcgacaactcgccgtttgcgctggtggttccggcttctttaggaattttaatgcagtctcccgatgattattatgaacggtggatttccgcctcgctcatccgggcgctcaggtttacgtctatttttatcacgctgtttttttcgtccatttatatcgccctcgtttcgtttcaccaagggctgctgccgacgtcgcttgcagtcaccatcgcggcgaacagagaaaacgtccccttcccgcctatcattgaagcgatggtaatggaaattacaatcgagctgctgagggaagcgggcttgaggcttcccagcccgctcggccagacgatcggattggtgggcggagtcgtcatcggccaggcggccgttgaagcgaatattgtcagctccatcatggtcatcgtggtcagcattgtcgcgctcgcttcatttacggtgccgcagtacgggatgggtctgtcgttccgtgtgctccgttttatttcgatgtttaccgcggcagctttcgggctgtacggcatgattttatttatgctggcgatctacactcatttatcgagacagcgaagcttcggttctccgtatttctcgccgaatggatttttcagcttaaaaaacgcaaacgactctattctccgtctccctattaaaaatcaaccaaaagaggcgaaaaacgtaaatgagccagaaaacaactcacaataagcttacaagctatcaagggacagcattgattgcaaacacgatgctcggcgcggggctcctcaccatgccgcgggcgctgtcatccagggcaaattcgccggacggctggatcgcgttatgtctggaaggcgtcatctttatctttttgatttatctcaatacgctcattatgaaaaagcatcagtacggatcattatttgattatatgaatgaaggactcggcaaatgggcgggaaatatcgtcaatctgatgatctgtctctattttataggagtcgccagcttcgaagcccgggcgatggcggaaatggtcaagttctttttattggaaagaacgcccgtgccggtcacactgtttatctttatcgcctgttccgtttatttaattatcggcggcatgagcgatatcggcaggctctttcctttctatttaacgattacgatcattattttgctggtggtgttttctttcagctttaaaatatttgatctggacaacctgcggccggtgctcgggcagggattttctcccgttatggcttccttgaccgtcgtttctgtttccttcttgggaattgagattatgctgtttctccccgagtacctcaaaaataaaaagcacacattccgcatgtcggccataggctttggcatcccgattattttatacatcattacctacgttctcgtcgtcggcgccttaaccacccaggatgtcaaaacaatgatctggccaacgatcgcgctctttcaatcatttgaaatcaaagggctttttattgaaaggttcgagtcctttttgcttgttgtctggatcatccagtttttcgccacctatgtatcatacggatatttcgcgacatcagctcttcataaaattttcgggctgaaacagaaaaaaggcatcatcttcgtaggcatcgcgacattcttcggatcattgttgccaaaagacggaaacaagctgatgctgttcagtgatattctcggctatatcttcttggttttctttttgctgcctttactgatgtttgcagtcgtcgctgtgaaaaggaaggtgaaaaaagcacaatgaagaaatacatcgtaatcatattttgcacattgcttttggccgggtgctgggacagccgcaatttagaagacttgagcctcgttatcggagtcgggctagataaacccgcggaagaaaatgtggaagtgacacagcagattctggttccgcaaaaagcaagtgcccagcagtcgtcgtcaggtgacacgacaaaggtgacttccactccaggggaaaccgtccatcaagcattaagaacggcatcgttaaaaaatcaccccgccttctcccagcacttgcgtatcatgctgttttccgaagcgctgttaaaggatgacattccgcttgacgcattgatgaaccaatttatcagagacaacggtacgagaagaagctgcaatgtgatgacggtgccggataaaacgaaagatattttcaatatcagtgaccagggagaacctgcgtcaaatacgatctatgacttaacggagaataattcggtcaccatccggatgatggagcccgtgacattgggggaaatatcagagaaaatcgccaagggcgaaacctttgcccttcctcaagtgcgcaaagtgggcagcagactggaaatctggggcgctaccattattaaaaataaattctggtatgcaaatttaacgcctttacaagtccagaatatgaacctgttcacaggcacggtaaagggaggcgtcacgtttgcaaagcatgacaattattatttatctttcgaggtattttccagcaaatataatgtaaaaacacaatataaaaacggaaaattcaagtttatcgtcacccggtttgttgaaggccgtctgtctgaggattggaatccgaaagaagattctttcaaggagtcctatataaatgaaatcaaaaacgcggtaaaacgcagcattcattcagatgttatggcattcattgattacatgcagcatgagttgaaagtggatattaccgggttaggcgatcaagtccggattcattatcctgataaatggaaaaagatatcctctgactgggatcatcacttcagtgaatcggatattgaatacaaagtcaaagtcgccatcagggatttcggaacaaagggaatgtcccaatgaccccgtccctcgggagagtgtgccggcgccgctctcctttttttatgtcacgagatgattgcggtgggcatatacggctgcctgcgtgcggtcactgacatcaagctttgacaatatattcgtaatgtgggttttcaccgttttaatcgtaatgaacaactcttcaccaatctctttattcgtcttgccttccgcgacgagacagaggatttccagttctcttttcgtcagcgtttcatgcggaagctgattctctgaatggcgcagccttgacagcacttttcccgccactttcgactcaagcttcggttcacccttggcagccgctctgatggcttctgctatttctgccgccttggacgttttcagcaaatagctgagcgctcccgcttcgatcaccggatacactttgtcgtcatcaataaagctcgtcagcacgatgattttcgggtcattgagtttcgcgcagatctgttttgtcgcttcgatgccgtccatgccgtccatgacaaggtccattaaaatcacatccggcaaaagctctgcggccagatcgacgccctgctgcccgtctgatgcttcaccggcgacttcaatgtccggctgtgcttctaaaaatgcggccagacccatcctgaccatctcatgatcatcaatcagtaacactcgaatcactgtcgttctctccttttgttttctgataaatcgggactttcacgtcgatctgcgtgccttttcccttcacggagataatttccgctatgccgccgatttcactcgctctttccttgatggaatgcaggccgtatgaggatgctttcacttgatccatcgtaaaaccctccccgttatcaatgactttaagctgcagcttttgatgtttcgcgccgagcctgacggtgaccttggtcgcctttgaatgtctgaaaacgttggaaagcgcctcctgcacgatgcggaacagatggtcttcaacaccttttgacacacccgtatcgctgatgtcccactcaatatccagcggctgcttcgctttgaactcttttaacagctcaatcagcccttcttttaagccttttccttctaaagtgacgggccgcagatgcaatagcagcgctctcatctcgttttgcgcttcccccgccatatgttcaaccatgcgaatccgtttgacgattttgtcatccgcatctttcacctgctctaagacggcggatgtcatcatagaaatggcaaagagctgctggctgacggcatcgtgcagatcgcgcgccagccgctggcgttcttcagtgatgaccgattttttcatttgatcctgccattccgcccgctcgttggagagtttttgcagcgatgtgacctggagctcgacccgcttggccatttcgttaagctgatctgccgccaggccgatttcatcatcgccgagcggcggcacccgataagcgaaattgccgttttcaaatttcaaaaccgcttcaatcagtgtatccattcttgttttcaggcggccgccgtatacataaccggaaatcaatccggccgaaagagacgccagaagcaggatgaccacaaacggaataccgaaccagccggaagaaaacagcagcatcgggtcaagcccgtaatacagcagcatcagcgtaataaacaccgcacaaaggagcagactgagccccgcagtcatccgcatggcgcgccactgaatattggcgagtaattttttcctcataaatacttcacatccacatcgccgatgaataaagaaattgaaattttaatccgccgcggcgagtcgccgtactcagacgatactttataaagattcgggctcatgccgcttttcttagagccgagcaggttcatatcgccgataaaagccgatgaactgacggacacttcgatatccggcgggacgtacacatcgacattgccgatgacaccgctgatggtcatcgtgctttctccttcgggaatcatcgcttttgacaaatcaattttcacatcgccgatgaatccggaaacatttaaatcattcagctcaaacgggtccttcatcatccggagctcgccgataaaaaagctgcggaggtccggctgtctgctttccgtctgggcggaaggctttggctgctcttctttttcaagattgattttcttctctttatgttcatacacgcgctttcctttcaggagcctgtagcccgcgtatatgagaaaggcggcgaaggcatagccgaacaggttaaaggtggcgctgaacaggttcctcaaaaataaaaaagcggcgaagatatacaggacggagccgagccagccgcgggaatatttattaaaaatatagcctgtgatcagaaaaaagagcggccaaaacaagaagtcgccgatgccgataatacgcaaaaacatgctgacgcctaataaggcgatgataagtccgagaatctgtttttttgccatcagctgcctgcccctcctttccttgactattgcagtgcaatattgccgctcgtcacttttatatcaatcggcctggcgccgctgcccttcataccggtgaatgccccgccgtccttactcgttttctcaaaggaataagacggctgaatccttccgcttgccgtctcggcgttcaccgtaaaacttccgtctttcggcaggctgatcgctgcgctgccgctcgcaagcctgacggatacgggagcatccgccatctcaagcgaggcgtcgacactgccggaagcgacccgcacgtcaagggcgcccgccgcatgttgaagcccgacatgtccggaggataagcggatatcccccgttttcgccgcaaggcctgatgctgtgaggttgcccgacagccctttcgcttcaaacacatccgtcttcacgtgcttcagcgacatattcccgcttacagaacggacgccgaggtgcgcaagagacagccccttgtttccgtcaacggcaatggtgccgcttgacgtatggacggtaatgtcccgatgataatcatacggaatgcggacaatcagcagaggacgctgaaagagattcagaaattggaaccctttctccttcgctttgagattgagggtttttcccctgctttggacaaacattttccccgccggtcccgccatgtttgccgcgatatcattccgcgcttccgcgatgatttttacatccgtctgttccgatgaaaccgacaggctgttgacggcacgcggcggtatgcttgccgattccgcttctgtttcgtacagcggaaaaaaacgcccggcaaacacttctttcaccaaaaacagacagcagatcagaacggacgccgccatcagtcctttggccatcttacgcttcattacgttccatcctttttcattcattttattataaaggaaaagccggagaattgatacgtgcgtatagggaagaggcgtaaaagcgccgatcttcccttgtgcacattattcatgagccgctttttgatgctctgttttctccagagaaagcgagcgcattttttcaatctcagcttccacctcgtctgaatattgggagcggctgtattctgtgttcgcctcagctgaagtgccgtatttgacgcggacttccatttcttcaatgcggctttccattcgaagaaactctctgtaggcgctttcactgtcaattttgtcgaaagaagcgttcatatgttccttcgcttttgccgcgttggcgcgggcgatgagcgcctgttttttatcctttacgtcgcggaggcgcgtttctaaagtttccagctgctctttcagctctgccagctgtgttttcgcctgctcatacgctttttcatgttcggccgcttttccctcaaggtatttcatttcagtcagcgcctttttcgcaagctcctcttccccggcgtcaaaagcaagctgagcctggtttttccgttttgccgccgtttcggaagcgtcttcctgttttttcttaaactgatggacgatcgtgtgctgtttgacaatcgtttgtttcgccttagcaatgtcactttccatatcacgcacatattgattcagcatgactttcggattttctaatttatcaagcccttcgttaacagatgcgacgaacatatttcttattctttttaagaccattttgtcttcctccttattttttcttcagaaattcttcccattcagagtcaaatccggattgatagcccggtgatgccgcttccggttcatactggcgggaagcggtgtctgagccgccctgcttcatcatcttccacccgaaatacaccatggcgccagccagtccgatggcaacgataaatggaagagaaccgacgagaatcatagctccgatgaagcccgcgatgatacccgataccgcccggccttttgaaaaacgtttgattccccagtaaagcatcaggcctccgatcgccagcgggatgataaatgcgaaatggcctcctccgaaaaagacagaaagtccgaacacaatcagcagaaagccgcctgccgtttttacatttatattcatgcagatcctcctttcgttttccttgtctttactataaacaaatcccgcggccggcaaaacgagtcagagattgattttcatatcagaccggagtcgtataacccccggaccttcgcataaaaaaacgccgctgcaccggacggcgcagggcgtttcacgaaaaatctatattctgatgctcgcttctttttccctgatgagatctgagcgttcagctttggccagcttcgtaaagagcaatattccgagaccggacaggacttcaacgagaccgccggcggcaatgacttttccgggaccgaaggcgttagccgcgtatccgcaaagaaccgcgccgagcggaatggatatgtttgagatcatatggatgacggcatagacttgcggctgatcatcatggtccacagacgtctgaataatcgtatattccggcacattaatcgcgctgacggcagatccgaacgcaaacgcggcgaggaagacgagcggcagaaaagtgttgaggccggtgatgaaaaatgccgccccttctatgattcccgctgacacaaacaggagaccgtatttgttcaccttcaccttagccaaaataaaacccattaaaaaggctccgcccgtgcctgtcgctttcaaaagcgagtagatgatcggcggcatgtttaaatcttcggcgacataaacggcagagagcgcctcccacggagcggccgcaaaattcatgaagatacaatagatggcgagcgggtataaaatctggtgtttcctgacaagaacgaaaccccgtttgagccttccgacatacgtcccgcgctgtctgacggcgacggtatcctctttggcatgctggacttggtatgacataaagagtacgagaaaacctgatagaagatagaatataagagcgataaacaaagaataagcgggactgataaatgttaagaacaccccgctcagcgtaatggcggcaagtctgacgatctggcctgatgactggatgaccgcattcgctttctgcaggctgttttctccgacaatattggggattaatgagatagatgcaggattataagcggctcccgtggctgaatgcaaaatcatgagaagcatgacaaaccataaaggagaaaaaccgttaaagtaacagaccggaatgatcaacacgaccgccgcgcgcgtgagatcggagaaatacatccagaatttcagcgtatgctgcttcataaaaggcccggtaatcggcgccagcatcgcctccggaaggaacgtgaccgcaatgagcagggacgtgccgatcgcgccttccccgtcaaaaatcaaaaaccacagaatggaattaaaggcaaaaccgtcgcctgacaatttaacaagcctcgagataaacagaagggtgaaatttttattccagatgctctcgctcttattatatgtatccatctatcaaatcccccattattttacaatgtttcttataatatctcattttttaatttttcagtcaataatgcataagatacattttccttctgtcaataaaggttcaattgatggatatctctataaaaaaacagccggcttgctgctgccggctgaacaaaacgttattcatcatcacggaataccgcggcgcttctttcatactctatatcctgaacgccctgtcttgcgttaactgctcttgccgccgcgaaaaaataatcagacaggcggttcaagtaacgcatcaccgtatcgtttatctcttctgttttgcccagtttcacgacgagacgctcagcccgtcttgtgacggtccgcgcgatatgaagctgagcagccgccttatgcccgcccggaagaataaatttctcaagcgggggcgcttcagccgtgtaacggtctatgcagtcttccaatgcggaaatagatgtctctcttaatgtatagcttctatgttcagtgaccgtcgccaagtcgccgccgcagtcaaacagctcatgctgaatgtttcggagttcggctttcacatcaccgcaattctcacaattatctagctccgcaagcgcaagcccgataaagctgttcagctcatcgatcgtcccgtagctttcaacccgcagactgtctttatccgttctgccgccgatcaggcttgtctgtcctttatcgccggttttcgtataaagcttcattgttgtattcctccttcttccgccgcttttacacataccgcggttcctcttctgacggctctttccgcgtgagggacgtccattgcctctcctgtctgcaaggcacaaatggcaatgtcgccttttgccagtctgccggaaagagcctgcattctcgcttcagccgctgccgttaacagccgaacaaatccctgttccgataaacgtccgctgatcagcacccaaacggtatactgcgcagtcacggctatcgtaaccgaatcaaacgtacggcagatcaaaccagctgccgccgagccggaaagccggcggctccacgaaaagcccgggccgtcagatgcggttgacagcattctaaacggccgttctgtatgaagcgttacggtatttccgcttttgtttatcagagaggcgaacggaacgccggcgggctctctttcctcccgcgcttccggcatgaaagcgatcagcggtttcggcgacgattgccgggcaacagcgctgacggtaatgccgtaaatgtcttcaatcgtctcttttttcaaagcctgatccggtggctgcttcggaaaagcgcgtccgtctttcatcatcaggagctgatcacaatattggcttgcgacgttgaggtcgtgaaaaatactgatgaccgtcaggcctctttctctcgtcagccgcttcaccgtatcaagcaggtctttttgatatttgagatcaagaaaggtcgtcggctcatccagacacagcacctcaggctgctgagccagcgcctgcgccagatagacgcgctgccgctcccctccgctcagattgcggacggattgctgtgcatatcggtcgatgcccgtcatttccattgcttcccggacaatgtcttcgtcatgttgatccatctgtctgaagagtcctttttgatacgggtatctgccgaaggacaccgtttccttaacggtaaatgtaaaagcttgctccgtatgctgcggcaaaacggccataattttcgcaagctcccgcggcttgtatctgcccgcgggcctgcctgcgacgagcacctcgccctttgacggagagagcattcccgtcagcaatttcatcagcgttgtttttcccgagccgttcggaccgagtatgccgacaaattcaccttttccggcggtaaaactgacatcttctacaatcatccggcctccgtacccgccggacaggctgctcaccctgatcataagcgtttccctccatgatgctggcgaagcagaatcaaggcaaacacaggcgctcccgccaaagccgtcataatgccgatcggcaattcgacaggctcaataacggtgcgggaaaacaaatccgccaaaatgagaaacccggcgcccgtcaatgctgacagcggcagtaaatggcgatgatccgtcccccacaaaagccgtgtcacgtggggaatgacaaggccgacaaacccgatcgtccccgagacggcaaccgctcctcccgtcaacagagatccggcggcgatcatcagcagttttctttttcccgtactgacgcctaacagctttgccttttcttctccataagtcataatgtttaattctctgccattgataagcagaagcgccgtcccggccagaaaaaaaggcagaaacagcgcgacatagccccagcccctcattgacacgcttcccaacagccagcggacaatcgggagcagatcatttcccgttaaagcaatcacaagcgaaatgagagccccgagaaaagaattcataatgatgcctgtcaaaatgagcgtcgaaaccgacatcgacgcatgaacgaggcggctgaaaaacagaaccgccgccataaccgcaatggcagcggcgatgctgacaaccggaagtgtgaaccggccgatgacgggaatctgaatgccgaaaaacaaggtgataacggctcccgccgaggctcccgaagataccccgagtgtataagggtcggcgagcggatttttcagaagtccctgaaacgccgcccccgcaatggatagcgcggctccgacaagagcggccagaacgactctcggcaggcggatattgatcataatatttacattcatgggatcaacagaggatgtccggccgatcccgatccaaaaaacgtcggataaaggaatatgcagactgccgattgaaatgccgagtgccgtacaaacggctaaaaacagcaggctgaccgtgtaggccagcgggcggttactttttaaacgtttcaggataaacgctttctgcaagcttctcgacccctttgacaaggcgcgggcctgagcgtgtgacaaggtcaggatcaacagaatagacattgtggtgtttgaccgcattgacggcaccccagccggcgcgtttttccacttcagcggcctttacgccgtctgtcgtgatgataacgtccggattcattttgacaatcgcttcatccgtcagctgcacccagccggtctggctgccggcggcgtttttcgcatgtatatcttcaagcatttcgttcataaacgtgtctttccccgtcgtgtagccgtcaggagacacttcgacgaatactttcttttcgtctttttcagaaatggccgccgctttcttttctatgccggaaaggtcggatttcatcgattggatcagctgatccgcctgcttttctttgccggccgcttttccgatcatgctgattgatttgtacacatcttggaacgattgcgcatcattgaccgttaagacggtgatgcccgcatctttcagctgcttcatcgcatcggcggaagcggacatagaggacgcgtgggcaagcacgagatccggcttcagcgcgatgactttttcagcgttcacattcatatctccgactttcggtttttttacggcttctttcggatatgtatcatttgtcgtgacgcctgcgaccttatctcccagtccgagcgcgtatgtaatttccgtattgctcggcatgagggaaacgattttttccggtgcctgctttatggttactttttcgttcgcggcatccttaatggttaccgggaatgcttcggttgagacggctttttgtttggccgcgcttccttcttcctgtgcgccggaacagccggcgatcacaaaggcggtgaccaagagcgccgcccagacggcagtgatcttcttcattcttttaactccccctgattatggtaaacgattgtctctttgacattcgtatccttttttcgcagtaattatactataagtctttaaggcttgtatatccggcctttttgcatgaaagcaaattgttcgtacacactaaaattcatcatgtatactgttacacaatggtgtaataaggaggattatcatggaattacagcttgaacgaaagctcgtattgattacaggatcaacttcagggatcggaaaagccgcggcaaaaagctttttagccgaaggcgccgaggtgattgtaaacggaagaaaaaaagaaaccgtggaacggacggttgaggagctttccgcttacggaacggttcacggcatcgctgcggatttatcgcgtcaggatgaggcggatgacctgatcaagcgcgccggcggaatcggggaagtcgatattctcgtcaataatctcggtttttttgaagtaaaggacttcgctgaggtgtctgatgacgaatggactcggtattttgaagtgaatgttatgagcgccgtgcgcctgtgccggcgttttctgccgcaaatgcttgaaagaaacagcggacggattttgaacatctccagtgaagccggagtcaaaccgcttgcgcaaatgattccgtattcaatgacgaaaacggcgttaatcagcttgtcccggggaatggcggaaatgacgaaaggcacgaatgtcacggtcaactccgtgctgccgggaccgacatggaccgaaggcgtcgcttcttacatggaaggagccgcaaaggctgccggagaagacacggacagcttcgtccgggattattttaaagtgaatgaaccgacatctttgattcagcgctatgcaaccccggaagaagtcgccaatacgattgtatttctcgcttcatcagctgcttctgccattaacggcaccgcacagcgggttgaaggcggcatcatccgctccatttaacacaaaaaagcccggcacaaggggaacttccccatatgccagggcttttttttacatcatgcctgcaaacggaaccggctcccagccgcccgtctcaagctctgctgaaaacaggccgcccgcatgcggctgctcaagtctttcggcttccgtcaatttttccgtcgcggtcgtaatgtataacgtgttcaaattgctgcctccgaacgcgcagcaggtgacgtatttcgccggaacttcgatagatgcaatttccttatgcaaaaacgggtcaatccggacggcgcggccgcctccgaacagagccacccacagcattccgtcacggtcaatggtcattccgtcgggagatccttgcgactccggaaagcggtagaccgttttcggatctgatacggctccggtttcaggatcatatgcataacagacgatttcctgcgtcggagtatcaatatagtacatcaggtttcggtcccgatcccaatccaaaccgttcgaggtggagacctggtcttttattttggcaaggctgccgtccgtattcagacggtacagcgaagcctcctcttctttgccttccatgctcgtcgttcccgcccataatctgccggacgggtcgcattttgcgtcattgaaacggatatcttcccgcatgtctttcggctgcttcatcttcgtcaatgtgtcttcccgcagattgtacaggtaaaacccgtctttcatcgtcatcaccagctcttcctttgaatacaaggccagagccgtgacaaatgagttgaatttaacggaacggttgattccgtcagccggagtgaagatatggagctggctgcccagtatatccacccagtacaggcattccttatccttgtcccataaagggccttctccgataactgctctcgtatctgctcgtaatgctgcttccatgtgtgaacacctcttttgcttgtcagtcttctattgttattcccgacaaagcggcgtccaaactcaatcttttttaaaaagaatcgtaatcaccgttccggcgctgattctgctgttgacatggatggttccgttatgaaggtgaaccagctctttggcaatggcgagcccgagtcccgttccttctgacggccccttcgtattcgttccccggtaataacggttaaacagctggtgaatcgtttcatcgtccattcctcttccgttatctttcaccttcagaatgagctgttcggctgattcctcaagcaccacccgaatggcggtccccttcttattatgcttaaccgcgtttgccagcagattctccagaatacggcggaaccacgcttcatcaatggcgaaaagaatgtcttcctttttggtttcaaaggcgatgtcatagccttccgagaacgtgtttttcgtaaaatcgttcgtgacgtttctgataaacggcacgacgttgatcagccgccgttcgatcgggagggccgcgtttttgaggcggtatgttaagtttaagtcctcaatcagcttagacatatattctgatttttcccggacgatctgccccatttctttgacttcttccggtgtccagtcgtattgcttcgattcaagcatcatgctgtagccgtaaatcgtgctcagcggggtttttaagtcatggctcagcccggcgatccattcttcccttgtcgcctggattttttctctgtttttcttatcccgcttcagcgtgtcggtcagctgatccatcgattcgaaaatctcggcgaaaaagcggaacggctgttttgttttgccttttttgtttttgctgaccggctgtcctttgcggttcttcggctcttcaagccggccctttgataaattgacaagccatttgatggtatgaaacagcggccagccgaaacggaaagagtaccagatggtcaggatgcagatcataaatactaagattccgatcaagaggaagagggttttcatcacatttctcaaaaatgatttgttaaactcgtgatcggggatgtacacggggttcggcaccgacgcgaccatccatttcgttttatcgagtcttttaaaagaaatttcccgtttgtaattccacggcttggaactgtatttcagcaattcaagctcattgacggtgttccgttcttttttcgtgctgttgatatccccgagcagtctgccgctgttttcgagaaggtagaccgcccctttttcccgtttaatataatcaaccgtgctttttttatattgagaaagggaagcgagggatggctcctgtgattcgatgtaagtgagaagctgctcactggcggatttccagccgaacagaatcaaataggtctcatcatttatcgtgaccgtccagtaattcagcttgtagttgtcaaaattccggtactggtaaatggataagaggtcttttctgctgtaatggctcgggacgtctttcggcactctgtatgcgtagtccgttttttctttgtcattaatgatctgcagccagcccttctgctttctgaccgacatctttaaaaattcatcgacatcccatgtgccgtcttcgtttttatcaagccacgcttcaaacgagtctgccgtcgctttggtcagtcccgcattggcttccgcttcgctgaaacgccaatccaaatagaagaaagaagcgacggccaaaacggacatcagcaggatgacaagcagaagctgtccgaaaaagtggagcagaaattttccgcgcattctcatgagcggattcctttttctccttgatcgggaataaaccgatagccgaggccgcgcaccgttacaatataagacggattgctggggtctttttcaatcttttctctgagcttgcggatatgcaccatgacggtgttgttatcgccgtaagacggatatccccacactttttcatagatctgatcttttgagagcaccacatcagggtgttcacagaaatattgaagcaattgcagaagctgtgcggagcagctgacgggctcgcccccgacgatcagctcggcgttttgcggcgaataggaaaaatggctgtatgaatacgtttttaccgccgttttctcttcgcgcttataggttctttttaacgtcgctctgatccgcgccgccaattcgagcggattaaacggctttgttatataatcgtcagctcccaatgcaaatcctgacagcttatccgcatcagaagaacgggcagtcagaaaaaagatcggagcgtcggtataattccggatttcggtgcatgcttcaaaaccggacatgccttccatcatcacatccagcacgagcagatccgcggtttcatgtttaacaaactcaatcgcttcctcagcgcttccggctgtcttaatgttgtgatagccttctttgacgagaacgcgtttgaccatatcaacgatcgccttctcatcgtctacaattaaaattgacgcattttccaccttggacgttcctttctctttgtttttttcatcatatcattatatggataagatttggtacctttttagtgcggaggtcttgcggggaaacagaaaagaaaaacgagacggacatctcttctcgtttttctcacgttgtcagagcggaatatccatcattccgccgcttttgtcaggagctttcatttataagatgaagaataaattcccaaaaacccggcacttcctggcataacagcatgtccgctttttcaactattttaatcttcaattcttgttcaaggtcttctctttcctggtatgatgtattgctcagtttttttttatcattggcgaaaaacgtgaaatcaaaagttccatttcgtcggtatctgtgttctctttgttgaagtcaaatggcccgttcactgcttattttccccctttttttgcttgtccagctgctttctgagattgtcgagcccttttttatgaatattggaaatgttctgccgtgattcacccagcgactcggcaatctctttcatcgtcgctccgtgaagataaatattcgtcagcacgcttttttgtttatcggttaacgtctgaagcgcttcgtataaatcacggttttggacatgctggctcaaatctccctgcttccgcagaaactcttcatacgcgtcttttcccatttcatagggaagcgcttcacctccctccggctgatccaccgtcagcggatagcgattctgatttttacggatgcgcttgtcaaaatcgatggagaaaatccggatcatagagttcatatatttgatgatccggatttccttataaaactgtttaaaatggtcgtccaatgattttgcatccttctcgtctgaatgttccagcacatttttaaatttctcgtaatgctttgggtcacttaaaaaatgtttaacgatcggatgtttcataatttccttgcattttgaccgtaaaagaacttgatagtccataaaaccgccccctatttaaattaaatgaaagaaagcaaaaaaaagtaaactactcctttccgactaagattccgcattccttatgtcccggatttgccggaacaaaaaaaaagaccctcaaccgggatatcaggtttacaggagccgctctttctttcacttatatacatgactgcaggtcaagtcaggaggtggctgacaatggatcaggtttttatagaagaagcggtcagacagatcggcaatctcggctttccggctctgattgctatgtatcttctcacacggtttgagaagaagtttgacgccctgatcgaactgatgacggaactgaaagatcagaaaatgaaaaattaattttcacacgaagttgacttttcatcggaacgcatcacttaacaaagcagaagggaaaacgaaaggcctttcacattctctttctgaaaaaacaaagcttgagaggagacgatttacatgtcaaaagaaaacaactgcaatatcccgcagccgatcagaggagacaaaggagcgaccgtcacgattccgcgcaatcttgaaagagaccgccaaaatccggatatgctgacgccgccggaaacggatcacggcacagtggataatatgaaattctctttctcagatgtgcataaccggctggaaaagggcgggtacgcgcgtgaggtgaccgttcgcgagctgccgatttctgaaaatctggcatctgtcaacatgcgtttaaaaccgggcgccatccgtgaactgcactggcataaagaagccgaatgggcatatatgctgacgggcaaagcgcgggtcacgatcgttgatgaacagggacgcagttttatcgatgacgtgaaggaaggagatctgtggtacttcccgtcaggcctgccgcactccattcaggcgctgaaagaaggctgtgaattcctcttggtttttgatgacggttccttctcagaaaacagcacattccaagtgactgactggcttgcccacacgccgcttgatgtcatcgccaacaatttcggggtttcagaaaaagacctcgccggcctgcctcggaaagaaaaatacatctttgaagagccggttcccgggaagctgaaagacgacattgtggaaggcccgaacggcgaagtgccttatccgttcacttaccgcctgctcgatgaaggtccgactgctgagacggaaggcggcaaagtatatatcgcggattccacaaacttcaaagtgtccaaaacgatcgcttcagcgcttgtcgtggtcgaaccgggcgcaatgagagagctgcactggcatccgaatacgcatgaatggcagtattatatttccggtaaaggacggatgacggtttttgcatcggacggccatgcaagaacatttaactatcaggccggggatgtcggttacgtcccgttcgcaatgggccactatgtggagaatttgggggatgagccgctcgtcttcctggaaatcttcaaggatgaccactatgccgatgtgtccctgaaccaatggcttgccatgcttcctgagaaattcgtccagcagcatctggatctgggcaaagactttacggatattctttcgaaagagaaacaccctgtcgtcaaaaagaaatgctgaagatacacacccgacttgcagagttccgtctctgcaagtctcctctgtgtgaaaaggagctgaacagatgatcaatcaaaacgggacgaaaatgttttttcttcaggtgctccggtatgccctggcagccgctgccgtattattcgggtatttcatcgtgatgatggccgtattttcattagccgggacgagctacggatcgatggcgtacgtcctgcttttttccgtgctttttattcttctcggtttatgttttgaaccgcttgaacggctgatgatacatagctttaccttttttgggacgggcaggctgccttttctccttttagccggcaccgttcagctgctgttcctctggatgactgcgtatacgacggataaactgattgaaaagatttggctgtcaacgacggaggagctgattgtggcgggggtttttttcgttttggataaatgcgtctccggacaaaagcagccccgggcgcactaaaaaaacgcaggccggaatggctctgcgttttttttcatcttacagttgcgttttcatgccggattaaatcgtaggttaagcagaccggtttgttcgtgcgcggatcttttacaatctgtgcgtcaatttgaaacacgtcttccaatataccgggagtcatgacttcctccgccgttccttccttgatgacgcgcccttttttcagcgcgatcatgtaatgggaaaaacgggcggcatggttcagatcatgaatgaccattaaaatggtgcggccctgctccttgtttaatttgtccagcagctgcaaaatttcaagctgatgggcgagatctaaataagtggtcggttcatcaagaagcagcagctccgtttcttgagcgagcgccatggcgatccacacacgctgccgctgccccccggaaagcgcttcgatcggccggtcgtaaaattcggccatccccgtctcttcaagcgcccatttgatcatgtcacggtctttatcactcaagcggcccattccggactgatgcggaaacctgccgtaagaaacaagttcgtacaccgtcagcccgctcggcgcttcaggcgtctgcggaagaattgccatttccttggcgatgtccttcgtggatttttgcatgatcgcctgtccgtttaaatagacggcgccggatttcggtttcatgattcttgacatcgttttgagaaccgtcgattttccgcagccgttcggaccgatcagcgttgtaatttttcctttcgggatggcgatatccaattctttcgctatcaaacggtcgccataaccgacagtaagctgttccgccgataatgagttcatcgcggcagtctccttcctctatttcgttttcatcagcaaatatacaaaatacggcgctccgagcacggaaatcaccaggccgacgggaacttcggacggtgcaagcacatttctcgccagcgtatcggcaagcagaaataaaaatgctccgatcaaagctgaaaccgggataagcgtctggtggcgcggcccggtaagccttctggccaaatgcggcgcaatgagtccgagaaaagcgattccgccggctgccgcaacacatgacgcggtcagggcaacggcggacatcagcagaacgcgccgctccttttcaaccttggtgccaagccccgccgccagctgatcaccgagctggagcacatttaaatacctggctttatagaggctgaacggtaaaagaaccagcagccacggcaaaatggacagcaccattttccaattggcgttccaaatcgaaccggaaatccatacaagcgcctgcatgaaatcccgcgggtccattttcagctgaaaaatcaagagaagcgcattaaaccccgcattgacaccgatcccgaccaaaacgagccggacaggtgaaacgccttttttccaagccagcacatagatgagcagcgcagccagaaaagcccccgccaaagcgctcaccggaagcagccatgtactggccatgcttagatcaacagctgacccttggaaaaagaagataaacagaacgaccgccaaagacgccccggcgttaataccgagaatgcccggctccgccaagtcattttgagacacgctttgaaaaatcgcgcctgaaaccgcgattcctgcgccgacaagcaatgacagcaccatgcgcggcagtctgaattcaaataaaacgagctgatcccgggcatccccctgtccgaaaaagacacgcatcgtatcaagtggcgcaatccggatcacacccatgtttaagctgataaaaaagacgatgcatatgagcacaaacgtaacggccatgaccgccagcggttttttcgattttacattcattacagccctctcctttccctgcgcgccaaataaaagaaaaagggaacgccgataagggcggttaaagcgccgaccggtgtttcaaacggcgcattgacgagtcttgcggcaatatcactgaagactaacagaacggcgccgaataccgccgaacagggaatgatccacctgtaatctaccccgactaaaaatcgggtgatatgcggaatcaccaagccgataaaagaaatggctccggcgactgagactgaagcccccgtcaagaggacaacgacaaacattccgattactttcacaagcgatgtgtactgcccgagccctttggccagttcctcacccaagctcagcaccgtcactgagcgcgcaatcagaaatgccagcaatagtccgataaccccgaccgccaaaagcagctgcatgccttcccatttgacggaagcgactcctccggcataccagaacttcacatcctgggcgacatcaaaacggatcgcaatcgcgcttgaaagccccgttaagaaatagccgactgccgtaccggccagcgcgagcttcaccggtgtcagaccgccttttgaagacaggccgatgccaaacacaataagcgctccgattcccgctcccgtaaaggaccacaaaacaagtcccgccgcagacagacccggaaaaaaagcaaatgccaatgcgatcgcaaatcctgaccccgacgtcacgcccataatggaaggctcagcaagcgggttccgcgtcagcccctgcataatcgctccggacacagctaaaaaagccccgacgagcgcggcggcggcggttctcggcagcctcagatcgcgtatgatttgatgagatgtattttgcggctgaaagtgaaagagagcatcccacaccgtccgcagatgaatatcggcagctccgatggaaacagacagagcggcgccgatcaataaaaccgcaataccggcacacagcagcacagcagcccggaatgaacgcgccgtccactggatttcactccctgatgccccttgagccgtcattgtctgtttctttttcaatagacccaacactcgttcttcctttctcaaaacaagaatggtaatgataatgattatcaatgacttgtttcagtatagcacttttatcttctcttttaatagacctaatttcatataaaaaaagaaagtttttctttaaaaagagcgtgcttctctatgaaagcagtgatataatcacactgataatgattctctttatcactaatttttatgaaagaaggaatgtcagatgttccatacatacaagaaaatcggcgcagcgctgattgccgtgctgctcttcgccgctttggccgcatgcggcaattcttcagacacaaaaggttcttctgaaaaagaagaaaccatcacgtataaagccgaaaacggcaatattaaaattccgaagcacccgaaacgggtcgtcgtcatggctgacggctactacggcgactttaaacagctcggcatcaatgttgtcggcgcgccgcaaaacgtatttaaaaacccttattacaaagggaaaacaaaaggtgtcacaaacatcggcgacggcacgtccgttgaaaaaatcattgacttaaagccggatttaatcgttgtctggacgacacaaggcgccgatattgaaaaactggaaaaaatcgcgccgaccatcgccattaaatatgacaagctcagcaacattgatcaattcaaagagtttgcgaaaatgacaggcactgaagataaagcagacaaatggctggctgaatgggataagaaaaccgctgccgctaaaacaaaggttcaaaaagcggtcggctcaaaaaccatctccatcatgcagacaaacggaaaagacatctatgtattcggtaaagacttcggccgcggcggaagcatcatttatgacaaactcgggctgaaggccacaaaactgacgcaggaaaaagccattaatcaagggccgggctacgccagcatttcactcgagaaactgcctgacttcgcgggagactacatctttatggggccatggcaggccggcggtgacgacaaaggcgtgcttgacagctcaatctggaagaacctcgatgccgtcaaacaaaaccatgtctaccgcattgatccgatcggcttctatttctcagacccgatctcacttgaaggccagctcgactacatcacaaaaagcttaacgaagtaaccccgaagccgctgtcacagcggctttttattacgcttaaaacttgacaaaaaaatttatttatgttataatttacatttttggattaacatgtataataagattctcccggccggagattgatgtaaataacggaggatctttatatgaaagaaaacaaggcgagtatgacttccctgctgtccgctttcggaagggcgtaccacagtaaatacgacaccccggtgatatttgatgattttatggcacaagatctgatttccgaaaaagagcattcggacatccgcgatcatctgattcaaggtatatcatttttcagtaaagacatggcacagaggcttcaaggccaaccggatgacatcttaaaatgggtgactcaagtacagctgtctcctacaccgttagcccgtgccgcatattgtgaagaagtgcttttgaatgaagtgaagctcggggccaaacagtatgttatccttggcgcggggctcgatactttctgtttcaggcatcctgagatgacaaacgtcttagacatatttgaaattgatcatcccgcttcacaggaagacaaaataaacagattgaaacatctgaatctcgacatttcccatcatcttcattttgtaccgatggacttcgccgcttcgctttctttcagccgtctgtatcaggaaggtttttcacgccaaaaaacctttttcagcctgctcggtgtgtcatactaccttacgaaagagcatctcgcccgcctgctcacacaattatttgccgaagtcccgccgggaagctctatcgtgtttgattatgcagatgagtcgctctttgaagaaagaggactgtcaaacagagtggaaaacatggtgaaaatggctgcagcaggcggagaaccgatgttatcgtgtttcagttataaagaaatcgaaaaaatattagaatcatcaggtctgcttatttatgaacatgtatctccggcggacgtcaatgaccgttttttcagcggacgcactgaccatttaaccgcatttgagaccattcattatatacacgccgtcaaaaagtaatccgctgttgcaaacaaaaaaagacatctcacagacgtgagatgtctttttgtcataccgatggtctgttgtttgcaaatttctttgagacgaaaggatataacagcaaaccgacgaaaaacagcccgataccgagaataaaggtcgttaaatcggccgttccggtaataatgacgtaaaaagaataaatgcaggcaaggatggcgatgataccgtctcttactcttgaaccctttatctcgtcatacgtttcacccgtaaaaatgagcttcaggctgtaaaacgctgacacgagatacggaatcagataagcgagcgtcgccgccgtcgttaaaaacgtaaacgcgtcactgatcgtccgggaaataaccgaaaagataaagatctgtgacattacgttcgttacgattaacgacacaaccgggcttccctgtttattcgtttttgcaaaagcagcgggaaagtctcctgatttcgccgcttgatacggaacttcagaaccgagaagaatccagccgagcatcgttccgaacagacacaaaattgccagaatcgccatgatgacgcttcccgcgctgccgacgatcgcgtacaatacgtcaacaaacggtttttccgagccgacaagcttaccatgcggaagcacgcccatcgtaatcaatgtcacgatgatatagatgccaagcgcgatcaataatccggtaatggtggcgcgtttcacgtcgcgctgcgaacgggcgcgcccggataaaatgactgccgattcaattccgacgaacgcccataatgttgaaatcgccgcattgtggatctgtccgccgattccctcaaccgtgtgaggacctgtttgaacaggaaaataaaaatgatcgaaaaacgacgtttgaaatacaaacaaacctgcaatgataaagaagataaatcctaatacttttgaaaacgtcgtgacgaaatttaatttactcgcaccgttaatgctggtgacgaggatcgtgtgagtgccccataataaaaccgtacatacggcaaacgtcagcagctggccgagcgtaaccgcctgaccgccgatcgaaaacatttcacgcttatccgttaaaatcgggaaaaatgatgttaaatatccggcaaggctcgtgatgatcgccacgttgctgatccagctcgccacccagtagccccacaccatcgtgaagcccgcagcattcccttttttccgatcgctgaacagcgcacgcgcatagctttgcggccccgccgtcagctcaggcttgcggatggataagtggccgaagaccagcgcgatcattaacacaccggctcccgttaaaagccatgccgatgtggcgccgaacgggctcgcgatttttgcgagcgtactcgggagcgaaaagatgcccgagcctaccatatttcctacgacaaacgccgttaataaccaaaaaccccattttttcgtctgttccattcctgtacctcctggttgttcattcgtacggaccagaccccgagaccatatttacacgcaaaaaaagcctgaacaaaagtccatgcttaaagaaacacacacacccttgatctccggatagccctccgcgaaaaagcacgcggcagtcctgcacttattcagatacagtcccagcataaagaaggatcggctttctttacacttcggcgctgatgcctttaacacatgttttgcggccccttatcagcctggcatgtgcgactcatcatcaagcgcaacctctacctcaccgagaaagagtgaggatttttatcattcaattctactcagaggttatcagagataaaaagatctgtcaaagggaaatattagatggaaaacggatagagcgttcgccctacccgtcttatatggtcagcggttgtttttttcttttgaacagcttcttgaagcggatcgtctttcagagctgcactggcgtcgtcaagcgcgccttgaatgacgtttttgtttttatcgctgttttttcctttttctttgttaaagaaagccatctgtatcacctctttatcaaatataggtacacctataatgtgtctttttccgcggcagaatatgcggaatccgcgtctccttccttttggcggaacaggtaaagtttgttgatcaaacatgcattctcttgatatatttgtaattcaggggattttggcaaaaataaaaaggagaagcgaaaaatgacaggaaaaacacacatcatgggaggcatcgcttcttgttccgcaattgcgtattattacgggtatgatccggtccttatgacctcagcgggtgccctcggggcgctgattcccgacatatgccatacgaaaagcaaaatcggcaggacgctgcccgttctgtccaaagtcgtaagcacggtgttcgggcacagaacgtttacacacagcctgctgtttatgcttattatgtttttcattacggcaacctatattccgaatccgagcatttccgccggactgatgatcggaatggcaagccatcttgtacttgacgcatggaccgtcaacggcattaaactgctgtttccgtccgccatccgcttccgtcttcccctttatatgagaacggggagcttttcggagcagcttgtgctggccggcttaacgattgtatcctgctattatttatacgaactggttcacggccgcatctcttaaacaaaaagcgtcttttcgcttttagggtgaggagtcatacatatgaagaaaacctttttcagcaatcatcggtttttatgcctgtccatcctgttcatgtggatgaaaacctatgccgtgtataagctcggtttcggtctgcagaacaattcggttcttgaggaatgtctgctccttattaatccgctgagcttcattgtgccgctgttcggcatcgccctcttgctgacggaaaaaaaacagcggatctttctgctttcggcaaatgtgatgctgacgggaattttaatcgcgaatacggtgttttacgggttttatattgattttatcaccataccggttttgtttcaggcaagcaatatgggtgatatgggaagcagcgtccaagagctgtttcacccgctttatatcgctttatttttggatattgcgattttgttttatcttggaaaaaggcataaagccgataaaggaaaagcgggcgcccgtaccgttaaagcgtatgcgtgggcatcagccggcctcatgctgtgcaaccttgcgctgtctgaggccgagcagccgaagctgttcaagcacccttttgatcgtgaagcgctcgtaaaaggaatcggcctgttccactttcatttgtatgacaccatttcgcagacgctgaatgcaggggctaaagcgtttgccgatgaagacagccttgcggcggtcgcgaattacactcaagccggctacagcaggccgtccgattcaaaattcgggcttgcaaaggggcgcaatgtgatctttgttacgctcgaatcaacacagcgttttgtaatggatgagcgggtcagcggacgggagattaccccgtttttaaacaaactgcgaaaaaaaagttatgacttcactcatttttatcagcagactgaacagggaaaaacatcagattcagaattcattactgcgaattcgctgtatccgtcttcaagcggcgccgtttttttcacaaaaagcggccaccggttcaatacgatgtaccatatgttaaaagaccgtcaatactattcagccgttctgcatgccaatcataaagccttttggaaccgggatgagatgtacggggcattcggaatcgaccgttttttcgacgcggatgaatttaaggtgacacaggaaaattcaacaggctggggcctgaaggataaggagtttctcgaacagtcagcggaaaaattaaagaagcttccgcagccgttttacgcaagcctgctgactttgaccaaccatttcccttttgaaattgatcaacaggatcagctcattgaggaaccggacacaagcagcgagttattaaaccgctatgtgacgacggtccgctatgaagatgaggctctgaaacactttttcaagaagctgaaaaaagaagggctgtatgacaacgcgatgatcgtcctgatgggagatcattacggtatatccgaagcccataatcaaggacttgccgaattcttagggaaagaggaaatcactccgtttgatacggttcagcttcagcgcgtgccgtttatcattcatattcccggggtgaccgaccgtgcgccggaaacgattgcttcggccgcgggacaggttgatgtaaggccgacgctgcttcacctgctcggcattgaaacgaaaggcagcattcagttcggcaatgatctgttttccggagagcggactccgtttgcggtgctgagaaacggcagctttatcacggatgaccatatttatacgaaaaatacgtgttacagccgtaaaacgggtgaaccgctttctgacatgagcgcgtgcagcgatgagaaagaaaaagcggaacaagagctgatgctttccgataaaatattaaacggcgacctgctgcggttttataagcaataaaaaaatccctccgttatatggagggatttttcatgtttcatatatgagccgtcctgtcattttcgtatcatatccggataattgagaaagctgagacttgaattcctcagaattaagaatgtcccgcacgctttgaacaagctcccggttttgttttaagacgaccacatcgtactgctcactgatcaccgggataaagtccgtgcctgccatatgcgccgcatgcagcgacccgactccgatatccgcctttccgcttgatacttgtgaagccgctgacagatgatccgtgacaatgtcatgatatccggcgacatcagacggcgtgatgccgaatgatctgagctgttcatccagcagcaccctcgcgcctgatcctttttcgcgattgacgatgcggacatcctttcggctcatgtcctgaaagccctgaatgttcagcggattgccctttttcacatataatccggcctgccgcagcacgacatgaaaaagcgcaaacggctcccctgaaagaatgcgcttcacatacgggatgttatactgccccgtctccccatcgtataaatgcagactgacgatgtcacaagccccgcggtacatctcgatcaggctgttcaaactgccgctgtacttgcggagcggagccgcctgtattgtttgttccagctgtttgctgaggaggtccatcgacacatcctgcccgctgatgataacagactgccttttttccggctcccgcccgcgtgacgggtcaggcgcttctgctgcggatggcttttttgacattctcatgtttgctttatattgttttaagtcctcttcatcgaccctcatctgtcttccgaccctgtacgccggaatgagtcctttttttatcaaatcatatactgtcagtttggagaccttcaaaaggcccgcaacttcttctattgtataggaagtggcttctgtcatattatcacgctccgtttttattataactgttcagatattgaaaaaaaaccgcaccatcacgtacaattgcgttataattagtttgatctaatgatatttagctataaggggtgcacaatgttgaaaaagaaagcgacactactcacaactgcggctatggccgttttcctcgcaactgcgggctgctcatccggacaatcgtccaaaggcggacaaaacgaaaacgtcacgctgaccgtttctgcagcagccagcgctcaggatgcacttgaagaaatccagaccaactacgaaaaatcacattcaaacgtaaccattcaagacaacttcggatcatcaggcacattgcaaaaacaaatttcacaaggcgcgggagctgatttattcttctcggcagccgaagataaattcgaaaagctcgttcatgacggagatatcgacaaaaaggacagcacggatcttttgaaaaatgatctcgtcatgatcgtgcctgagaaaaacagcgcacacctgacacatctgaatgacctgaaaaaagacagcacggaaaaaatcgcgctcggcacgcctgaatccgttccggccggacaatacgccaaacagtcactgacggcattatccctgtgggacaaggtaaaagataaagccgtctatgcaaaagacgtccgccaggtgctttcttatgttgaaaccggaaatgtcgatgccgggcttgtctataaaacagacgcgctgatttcgaaaaaggtgaaaatcaccgatgaagcaccggcgaaaacgcacgatccgatcgtgtatcctgtcggcatcgtcaaggatacaaagcaccgtaaagaagcagaagcgttttatcagtatctgcagtcagatgaagcgatgaaagtgtttaagaaatatggatttactgccaagtaacattacggcttcggagtttttcactcccgtcgtactgtcatttgaggtggctttggcgtcgggcatcgccgtcatcattctcggaacgcttgccggcgcctggatggcgaaagcgcgatttcccggaaaaacggctgtggagaccctgtttatgctcccgctcgttcttccgcctaccgttgtcggcttcattctcattatcattttcgggaaacacagctttatcggccgggcgattgagcggatttttcaccagcccgtcattttcacgtggtcggccgcggtgatcgcttcggccattgtcgccttcccgcttatgtatcagtccgctaaaaccggcttcgccgcggttgatgctgacatcgagggagcggcgaaagtagacggagccggcaggtggcaggtgttcacccgtatttccgtcccgcttgcctttccctccctcttgaccggaagcattctcagtattgcaagggcgctaggtgaattcggggcgactttaatgtttgcgggaaatattcccggcgtcacccaaacgctgccgacggcgatttacgtcgcgatggactccggcaatgaaacactcgcctgggtgtgggtgatctgtattgtgatcatttcttttctgatgctgtttttcatccaattgaaaaagcccgcttgaccgatctgccttccgcgcacctttcgccgggaggctttttgatttaaaatcggatggtatataatgaaacaaaaacacacaaagggtgcggctatgaagattaatgtcattatcgcggatgataattctttcatcagagaaggaatgaaaatcattttgcatacatatgaggaatttactgtatcagcaacgttggaaaacggactcgaggcggcagagtattgtaagcacaaccccgtcgatatcgccttgctggacgtccgcatgccggtgatgaacggcgtcgaagccgcaaaacggatcgctgaggaaacggatacgaagccgatgatcctgacgacatttgacgacgatgagtatattttagaagcaattaaaaacggcgcgaaaggatatttattaaaaaacaccgaaccggaacggatccgcgatgcgatcaaaagcgttttcaacgggcacagcattcttcaggacaccgtgctggacaaaataaaagacagccttttccggccggcggaagccgcgcatcagattgatgaaagccagtttactgaaagagagctcagcatcatgtcgcttattgcgaaaggattctcgaacagggaaatttcaaaacagcttttcatttctgaagggacgacggccaattatatttcatctattttagggaaaacggggcttgagcacagaacgcagatcgccattttttatatcaccgggaaggtggataacgggcgttgaacggtatggatttttggatgctgatgagcagactgatcgctattttttatacggcttttttgttcgtatcggtagaccgcccttacacgccgtacgccgtcttatttctgctgctttatctgtctttgggcatcgcggtctgcatgatcaggccgcccgcttggaggcgcgggatcaccctcatgacgctggcattgaccgcttggctttccgccttaggccatccggcgtttctgtttcttttgccgcccgccatttttgcggttcttgccgaatatccggttcaccgctatgtgttctgcctgctcgtgtttttgccgtttttatttatcccgtacggcgaccttccgacttatatcgtcataaccttgttctgtctggcgattttcgttttggccgcccggtccggcaatcggctgaagaaatatgaagaacagtcggacagcatgcgctcaagcattgaaaaactgacgaaacagctgcacagcagcacagaatatatcaaacaatcggagtacaccggcaaactcgaggaaagaaacagattgtcccaagccatccatgacaaaatcggccattcgatgaccggcgcgctcattcagatggaagcggcgaagcggatgctcggctcccatccggacaaagcggctgaactgctccaaaacgccattaccatttccaaagagggcatagaggatatccgcataacgctgaaaaatatgaaaccgcccgctgaacaaatgggcattcacagattaagaacgtttattgatgaattttcggccaaaaacgggatgccggttccgtttacgcatcaaggcgatttggacaggctgacgcaaatgcattggagagtcattcaggaaaacgtaaccgaagctttaaccaatgcgatgaaatacgccgatgccacgcagattttcattgatatccatgtgctgaataaagccgtgaaagcggaagtgaaagataacggaaacggcgccgtccgctttaaaaaaggcctcggcatgctcggtatggaagaacgggcggccgtcctgcacggaaccgttatttttgacggcacggccggtttttccgtcacgacattgcttccggttgaataagtgaatgttttcatgtgaaaaatatgaagattctcatgtcaaaggaatgaacagctgcactaacggccgttcattcttttttttataataagagcatcataagacatagaggtggaaacatgaacattttggagctcaaacagctgagtaagaaattcggtgattatgccgccgttgaccagatgtcgcttgccgtaaaagaaggtgagattttcgggtttctcggcgcaaacggagccggaaaaagcacgacgatcaatatgatctcaggtcttttaaaaccttcaggcggagacattctgtttctcggaaaagatattttcaaatatagcaaagcaacgaaaatgaatatcggcatcgtccctcaggacctcgcgatttacgaggaattaaacgcctatgaaaatgtgaagttcttcgcaggtctgtacggcctgagaggggcggctctgaaagaacgggtcgaggaagccctgacattcgtcggcttgagcgataaacacaaatatttgccgaagcatttttccgggggaatgaaacgccggcttaatatcgcctgcgcccttgcccaccggccgaaactgatcatcatggatgaaccgacggtcggcattgatccgcaatcaagaaattatattctgcaatcagtgaaaaagctcaatgaaatgggctgcacgatcatttacacgagccactacatggaggaagtggaagaaatatgcacacgcatcgccatcatcgaccacggaaaagtcatcgccgaaggcacaaaagaacagctgacctccatcattaccgacacgaaggacgtcgtgattgagctgtcatccggaaacggcatcagcctcggcgatattcaggagctgcccggcgtcagagccgccgcactggaagaaaacagcgtgaaaatcagctctgacacaggggtcaacaatttaaaccgcctgatccggtacttcatggacaaaggcattgaaatccgctccttgcaggaacaggcacctgacttagaaacggtatttctcacgctgacaggcagaagtctgcgcgactgaccctattgaaaggaggattgcaaatgaatattctgcacatcgccgggaaagaaatcaaaatcagtttccgcgacagacggacttttattttcatgcttgcttttccgatcgtcttcatgctgatttttaccgcggcattatcaaacgcctttgattcagaggtgacggtcgggaacatcaaggtcgtatatacggaccaatcaaacgggacactttctcattactttactgagtttatgaaaaacgccaaaaaagagcatgtctattttcaaaaagcggacacggaggcaaaaggcaaaaacgaggttcgtgaaaatcaggcggatgctttcgtcactgtaaaaaacaccggttttcaagtctatacaaatgaccggagcggcatcaacggcacgatcgtccaaggcatgctgaccgcttttaccaatcaatacaaagcaggcgccgccgcttacaaggcgcataagccaccttccgccggacaaatcaaaagcgattatatgaagcagacgtctttacacaaagcaaaagaaccgaaggcgaaagatttttacgcgatatccatgacgacgatgatcgggctgtacgcctcgatttttgcaagctccttattccgcggggaaagaatacggcacaccgcggatcgcctgatcgccgccccgctccggaaaagcgatatctttcttggaaagatgctcggcattttggctgtgaatgttctgacgattcttgccgttgtcgccttcagcaaatttatcttgaaagcgaactggggcagccacatgggacttgtgctgttgattctcgtttctgaaattcttttggccgtcagcttcgggctcagcctgagctatttgaccagaaaacccgaaagcgccagattaatcaccgtcatcatcgtgcaggtgatgtccattatcggcggcgcctattacaaatatgaaggagggggatttccgccctgtcgcccttatcctggatcaataaggcgattaacaacatcatttacgcaaatgatgtatcagcggcatggcctgcactcggtttaaatacagcattggcggcactctttttgctgatcgccgcatttacgtttcaaagacgggagggactgtaatatgaaaaacttctggtggctgtttgcacacactctcaaaggaattacaaaaagcaaaaaacagctcattctttatatcggggctccgctgatcggcgtcttcctctccttcatgaccaatgccaacggcggagccgaaacgctcaatatcggcattctcgatcaggacggcggagaagtggcacaggatacggtcacgtttttaaaaggactggatcatgtgaagatttcggaggaaacggatgcgtccgcctcatcaaagatcgcttcaggaaaaatggaggcgctcattacgtttgaaaaaggcttctcccaaagcgtaaaagacgggaaaccgtctcacatcggcatgacctcgctgaagggcgcccaggtcaccggatatgtcagctcttatttgtacaattatatgaacagcgccgcctcaatcggcaaatcttccggcggagacgagaaagcctttcaggcgatgtacgccgatttcaagcattctccgattcaaacggagtccgctgttttgaaagatacttcgaaccataaagaaatgacttactcagtcatcgggtatctcattatcattatgctctattccgccggcaacctgacggaactgatgattaaagagagagaaaacaggacgtactacaggcttctgtcaacgccgatcacgtcaaagcagtatgtattggcgaatgcggcagtgaatatcattatcatggccgtccaaattatattcgccgttctctttatgggcgccgcttttcatattcatccgtcattcccgctgtggcagctgttcgtcctgatgatgctgtttgcattaagcgcaatcgggatcgcctttattgccgtcggtttttccaacagcagctcttcggcatcggcgcttttgaacttgatcgttgtaccgacatgcttgctcgccggctgcttttttccgggcaatattatgccgaaaacagtgcagacaatcgccgaatttctgcctcagcgctgggtgcttgatacggtcgatcaattgcagcacggccgcacgctccaaagcctgacgctgaacatcatcattttgggagccttcgccgccgccctgttattaatagccgcatacaggttcagcgtaaaacgtcagacacagacatttatgtaaagaaaaacagccccgtaaagggctgttttttcttagaacagaagctcgtccggattcgggccgacacgctcgtctttgttcaatgcgctgatcttttccatttcttcctgtgacagttcgaaatcaaaaatatcggcattttctatgatgcggtgctctttaatcgatttcggaatggtaacgacttcgttctgaagatcccagcgcaaaatcacttgagcaaccgatttgttatgtttttccgcaatttgtgacagcacttcgttatcgaggagctgtccctgcatcaatggagaccacgcttccacttgaatgccctgcgctttgcagaaatctcttacttctttttgagtcaggcgcgggtggaattcaatctggttgaccatcggcttgatttcagcatctttcagcagttcttctaaatgatgcacttggaagttgctgacgccgatggcgcggattttgccgtccttgtacagcttttcaagagcgcgccatgtgtctttatatttatccttgcccggccagtgaatcaggtaaaggtcgaggtaatcgaggccgaggcgctcaaggcttttctcaaacgcgtcaagtgtcgtttcgtatccttgatcttcattccacacttttgacgtgatgaacagctcttctctggcaacgcccgcagctctgatgccttcgccgacaccctcttcatttttataaatagccgccgtatcaatgctgcggtagccgtttctgattgccgcttcgacggagtccgccgctacgcttccgttttccaccttgaagacgccaaggccgaaccacggcatttcaacgccattatgaagctttacagtatcttttaagctttttgccacgttgaaccatcctttctagtcattatgtaaacggttattattatctcacatttccgccgtaagaaaccaattatacgctcatcgttatcacaaaaaccatctttagtgcccaagcaccactgacgttattattttcctatttttcaaaaattacggttaatcaggtaactgtccgggtaaatcgctactgtagccaccacacaattgaaggaggaaatcatatgaaacgtatgcgtatcccgatgtccgttgcccttggcgccgctttgtctctgactcctctgtcctttgtatccgcaaaagaaaacccggcccctcaaaacatggctcagcaaacatcagatgtctcagcaaaagatgtcggattaaacattgacgttgacctgctcggcatcggcaattcgattgctgacgcgattaagtcggcgcaaaaccgtgacggcttcgtcaaaaacttaatggaatcttcattctacgcttccggacaaaaatataatgtcatggtgtttaatttaagccaggaatatgaagatcattttaacggcgttcagttttacggttccgccgtttatgacggcatcacgtacggcatttgggtgtttgaagacggaagcttcaccaacaaaggagatggcggctggatcaactgggccttcagaggctggtttgaccgcgacggcgatcacgtcgaattccatcgtccgtaatctaaaaaagtccggcgaacagatgccggactttttttattcatctccgtcaagcatggccgcttccacatcattgatgtattggcgaagctcatgcgacatgtcgcgggaaatttcccgctcttcgaataatgtttggatttcgttgcggatggcctgcacggcccgcagtttgatttcgagtttttgattttcaaaacggcgactcggactctgttcgtgatacgagtgccccagcctgaaaatcaagtgattgtaaaaggaaatgacggcaagcgtcacatctttattttcttcagtcatgtgttttttcaggctttcaatggccgcttttgccgttttaacccttgtggagcgaatgaggccttcttcatttaaaatcgacatttccggttttttatgttcgccgaaaaagatccagtacatcaggcgtttcagctttttcttagataagccgactttaaacgggttcgtataaagcacttccagttcatcaaaccgttcctgaaggctgtcagccgtttcttccggtatgtcgccccgctcaatcagccgcagcaattcttcctgttctgcctgaatcccttgggcgcggactttccgctcatcttttttcgtgcggtttttgacggtgaactgctgaaacctgagatttttcattttctcattgtattcggcaatgaccgcaaaagaagccgttttgtttgactcattcatattttctttaatggcggttaaggcagcctttatcagcttccgtctcgctgtcagcaatttgactttcttttctttcacattgtcttccggcttatctgtcaaaatcggcagaacgattgtcgccagcaccaatgtgcacaaaataacgcccgcggctaaaaagagaatcaaattccgttcaggaaacggtgagccgtcagagagcacgtaaggaatggaaaaggaacccgcaagcgtgaccgctcccctgacgcctgaaaccgaaatcagcagggtcgagcgcaggccgggtttataaatgctctgatccttgttaaaaaaccacttgccgttccaaaaaaacagcacccacaaaaacctgagaatcattaacgtcagcgtaatgacgataatgtacccgatgaccatcatattgttaaacgcggtatcattaaagatgacggaaaccacatccggtatttgcgcacctaaaataacgaaaacaagaccgttcagaatgaacaaaataatattccacgtacttgaagagacgatttgcagtttgaccatcgttgattcaagacggtcctgctccaccgcatgcgtgatgccgccggccacaaccgctaaaatgccggaaacgccgatttcttcagccgcgagatagatgacgaacggcgtcagaatttgaatcagcatatgcatcgtgacatcctgcatgccgaggcgccgcataaacagccggaaacggataatcaaaaaagaaatgacgacaccgctgagtaaaccgccggctgaaatcagaacgaaactgaacgcggcttgcgccagcgaaaatgcgcccgtcacggcagccgcaatcgcaaatttaaaagcgaccaggccggatgcgtcattcatcagcccttctccttcaaggagacgcagaatgccttttggcatcttcacacgccctgacagcgcgctgaccgcgacaacatcagtcggtgacagaatcgccgccagcccgaacgcggcggccagcggaatgctcggaatcatccaatgaatcgtgtaaccgccgacaatcaccgtggcaaacacaagcccgagcgcaagcagcagaatcggcgctcttaaattccaaagttccgcacgcggcgtccgttttccatcgttaaaaagcagcggcgcgataaacaaaacaaaaaacaattcagtattcagttcaaaatgaagcccctgcggaaatgacgccgcaatgataccgagcgccacctgaatcagaggcaccgggataaaggggacaaaccgatttacgatatttgagatcgcgataatggttaaaagtacgagtacgactaaaaatatgtccaaagctgacctccttcatctgctgcatcatatcattattgcctgttctctgcccttgtcaaaggccggagccgatgatcgggcagattcaatatattttccgcacgcaaccattctccttttattttacccgtttttatttaaaatttctcataacgcgctcacggcgaactttttttgccttcagctacattttttccggaaaaagaaaaagcctgttttctctgaaaacaggctttttcgcaagctgcgtcatctgtttcatgacgcggagcagcgtttatgctgcttagtaaaggatagagaacgcaccgccagtgtgtctctatccttggttttaagagctcatcttattcgtgaaaattcgtgccgtctgtcgtcgctttaatgatgccggcgcggatgacgaaatcgccgaagtgttcgccttcctcacgctctttcgcgtagcgcgggagaatggtgcgaagctcattcagaatttcctcttcaccgatattttcccggtacattttgctcaaacggctgccgtcaaacgccgctcctaaatacatattatattttccgggcgcctttccgataaatccgatttcgccgagtgcatggcgggcgcagccattcgggcacccggtcatacggatggtgatttcttcatcccggagcccgttttcgtcaacaatgtcttcaatcttatcaatcagcttcggcagataccgctcggcttcggccatggcgagcccgcatgtcggaagcgcgacgcaagccattgaactgcggcggagggcggaatgctgccagccgtctgtcagaccgtattgttcgattaatgcgctgatttgtttctttttctggctcgagacattgccgataatcaggttttgattagaggtgagacggaaatctcccgtatggactttggcgatttcacgcaatcccgtcatcagcttataattctcatagtccgtgacgcggccgccttcgatgaacatcgtaaagtgccatttcccttttacgcccttcacccatccgtaacggtcgccgttatggtcaaaatgataaggtttcgcttcatccagctgccagccgaggcggttttccagctcggcttttacgttttccagcccgagacggtcaacggtgtacttgaatctggcattctttctgacggaacggtttccgtaatcgcgctgaatcgtaatggttttttccgctacatcatacagctgctccggtttgcagaagccgatgacttttgaaagctgcggataagtggccgtatcgccgtgcgtcattcccataccgccgccgattgccacgttgaacccgataagacggccttcctccacgatggcaatgaagccgagatcttgagaaaagacatcgatatcattggacggaggcacggcgattccgattttgaatttcctcggcaaatacagcggcccgtacatcggttccgtttccgtgtcaggagttcccgccacacgttcctcatcaagccagatttcatgataggctctcgtgcgcggaagaaggtcatcgctcaatttcttcgaccattcgtatacttccgcatgaatttcagactggtgcggatttgaagcgcacatgacgtttcggttgacatctccgcaggccgcaatggtatcgagcagcgccgcattgattttctgaatcgtttttttcatgttccattttaaaattccgtgcatttggaacgtttcacgcgttgtcagcttcaatgtattgtttccgtatttttgcgccagttcatccatgacaagccattgttccggagttgacacgccgcctggcatccggacacgcagcatgaactgataagccggttcaagcttttgtttttgacgttcattacggagatcgcggtcatcctgcaagtagcttccgtgatgcttcatcagccggttgtcatcgtccgggatgccggctgaaatccggtcgagcatgacttctttcaatgtgccgcgcaaataatcgcttttttctttaatttcctcaacatcacttggagggccttccggcgcttttaaaatgttgttcaccatgctgaataagctcctttcaaaccaaaatcaatatacgtcacgctgatagcgttttttctgctgcatgtctgccaggaagctttccgctttttcacggctcatgccgccttcttcctgaatgatatcgagaagcgcctggtgcacgtcatgcgccatatgctgttcatcaccgcagatgtatacggcggctccctgctgcagccattcatacagctctttgctttgttctttcatgcggtgctgcacatatactttttcctccgaatcccgggaaaaagcgacgtccatttttgtaagaacaccgttttgcagccatttttgccattccgtctggtacagaaaatcagtgacaaagtgctgatccccgaaaaacagccatgttttcccttcagctccggtttcttcacgctcctgcataaaggaacggaacggtgcgatgcctgtccccggcccgaccataatgatcggtgtatccggattttccggcagcttgaagttttggttgtgctgaatgtaaatcggaagcgtatctcccggctggagtctttccgcacaaagaatgctgcagacgcctttgcgttctctgccgtgcgcgtcatatctgaccgctccgattgtcagatgcacctcttccggattcgcttctaaactgcttgcgatcgaatagagccgggccggcattttacgcaggatcgaaagaaagtcttccgcggaagcttcccacggaccgaaatcccggacgagatcaagcagatcacggccgttggtgtatgctttcagctgctcttcgtttccttcggccagaagttcactcagcttttgatcagccataaactgtgcggccttttgcaaaagcggctttgttaagacggtaatttcaaaatgagaagtaagcgcgtctttcagcggacggcgctctccttgtttattcaccgccacttcctgttccggattccatttcagctcattgatcagctcatcaacgagcgccggatcattttccggatagatgccgaggctgtctccgggctgatacgcgaggcccgacccttcaagcgaaagctcgagatgacgtgtttctttatttgaaccgcgtccgttcagattgatgttctcaagaacctccgcccgaaacgggttcgttctggaataaacggattcaccgagagcgggcgtctcggcaggcgcttcggctgtttgatttcccgctccttcgttcaaaccgccgatgaccgcttcaagccattccgaaaacggctcatcataatcaagatcgcaatcaacccgcggcgcaagctgggtgccgccgagctcttgaagacgctcgtcaaactctttgccggtctggcagaaaaattcatacgagctgtccccgagcgccaaaacggagtaacggagctcttcaagcttcggcgcgcgtctgccgtgaagaaagtcatgaaaggccagcgcgttatccggcggatcgccttctccgtgtgtgctcaccacgatcagtaaattgtttacttttttcagattattcggcttaaaatcgttcatcgacgcgacggtgacctggaatccccgttcctcaagcgtctttaccgtctgtttcgcaagaccttccgcatttcccgtttgcgatccgtataatacggtcacttctttcgagactgccgggctttcagcaggagcctgagcagcgggcgcggctgtttcaccggattcggaccgggccgcagccaaatagccgctcagccagattttctgtgattctgtcaaggtcggcagaaggcggttaaggagctctgcctgctcctgattaaacggactgttcatgacctgaagttgcaacgatatccacctcacaaggaattaaacgtaacgtacgttatttctataggaattgtcaaaataatattctaattgaaactttaccgaaagtttgtatgtaagtaaaatatataatcatgatgacaacgattaagattactaatgataaaaagccctttgcactcagcaaagggcttatacgaataagccggcgggcacttcttttataaaaggagagggttctcccggagacaatacggtcaaatgatgcatcgcccgcgtacaggccgtatataacagcttacggtcatgttcgctattgtactgggcagcagaggcgtcagcggcgatgacggcgtcaaactcaatgccttttgccaaataaacgggaatgacgcatacccctttttgaaaaggctggttttctttattgattaaacggacaccgctctcggcgctgaccgcctgaaacacttttttggcttccgcggccgttttgcagatgacggcgaccgtctcccagcctttttgtctgagctcccggattgtatccgccaattgttcccgccgcgcattttctgtatccgtccgcaaaacacgcggtttttccccgttccggttaaaaggctcaatgtcatcgccgtcagccagcagcgctttcgtaaattcaacaatctgccgcgtcgatctgtaagtccgcttcaggctgacatacttttctgcaccattgcgaaagcagccggcgagggaagaagggcccgtaatggtatgggcataaatcgactggctgacatcaccgagcaccgtcatctttgccgccgggaagatggtttgaatatacgtgagctgaaatggggaataatcctgcgcttcatcaatgaagacgtgcttcatttgtgtgttttttctttttccttctaacagatcctgcaaatacagatacggagcggcatcttcatacggaagcgaccgttctgcaaatgcgtttccggtcaaagcgccgatgctctcccaatgatcgggcttttcatcagctccccagtctgaaaacagccggagatacatccgttttatatcgagaaagccgagccgtctgacggcctgcttaatcggtttaaaggctttgccgacaataatggcgccaagcaggcgctgttcgcgctgatggtcgtcaaatgcaggttcatcatctgccgcctgcttcttgagtgtttgataaacctcagcatagtcttccttatcaagcagctcgctctcctgcaagacccattccttcttacgctcctttttttcgagagcgctgatttccgcgagaagccattccgccgtcagctccgctctgttcggaatcggcagctgctgatcaagcgaataaaaataggcttcaatccgctcttttgaaatcaggatgtctccccggaagctgatctgtttacatttcaggcccgagaccgaaagcgacccggcatagcggtcaatcatggcctgaaaagctgatgacgctttgtaagcaatggctgcgagccttacggaaagtgcgtccttattttgttcagtcaggcaatattcaagctgctcgtacgggctttcacaatcaaactttcgtccgagccggcggatgatatattcctgaaaggtggcctgctccatattctcttctcccaattccggcaatacggcggacacataactgttgaacaaaatgttcggggaaaacaatacaatctgacgggcatcaagcaccccgcgcccgcggtacagcaagtaagcggcccgctgaagcgccgcggatgttttcccgcttccggcggctccctgaacgatgagatatttgcttttttcatcccggatgatttcgttctgttctttttggatggttgacacgatgtttttcatatgctgtccggaatggccgctcagcacctcttgcagcatttcgtcaccaatcgtcatatccgtgttaaacatcgctttaagcgtcccgtttttaatgataaactgccgcttcagtgtgatgtctccctctatcgtttcttccggaacttcatagcgggcttttcccggggaatattgatagtaaagagatgagatgggcgcgcgccaatcataaatgagaaattgctcgttgttttcatccattaaagaagtcagcccgatataaatccgctcggaagaggactcccctttttccgtaaaatcgacacggccgaagtaaggagaggttttcagcttttggattttttgaagctgccggtattgaagccgatgcgtccgttcacgttctgaaagcatttccgcctgctgtttaatgcttaaaaatgtctcagccgcttcgtgggcatcatccatattcacggtgacatcatcccaaaacgtttttctcaggccgacaatatcctgcttcaatccgcccgatgaggcttcaagatgagtttgtttctgttccagttccttcatgacaaaattgattctttcctgctcttctttccactctttatcacgttttgccatcagcggcacctccgacatcaagctgacaagtccggctttcatcatacaaacatatatgcaacatattattcagcattatggtcaaataccctttttcttatcatatcgggcgtctttttttatcagaagccgttatgcaaaaaaaccgatttcgtttgtgaaatcggtttttttactgttctatatgataggaacgaatcggcaggcgccacctgaacacataactgcagatgcggcatgccacaagcacaagaaacagcacatacaaaccggcggcatccccggcccagccgaggcccacgattaaccctccgagcgcggcccagactgcataaatttccgccttgagcacaagcggctttctgcccgcgagcaaatcccgtatgatgccgcccccgctgccggtcaggaccgctgccgcaatcaccgcactgagcggatggcccattttcacggcatataaagcgccttggatggcaaacgccgaaagcccgatggcatcggataggttgccccatttactccaatgccttaacagcagcttcggaaacaaaaagacaatcgtaactgatgcgagagcgatttgaaaaaacgcgccttgctcccacaaggcggagaccggaacaccgatcagcaggtttcggatggctccgccgccgaacgccgttacaatccccaagatatacacgcctaaaatatcatactcctcttccatcgcaacaatcgctccgctgaccgcaaacgcaatgatgccgattacactaagcagctcccaggccattccatatgctcctttttatttgttaaattttctgacgaccattagattttataatcgctttctcttaaaatcaaccttatttttgaaagattctgattcctgatccgggacaacctcatccgcaacggctgaaagcaagaatattttcctattttatactttaatggaaggtttattggaagtttcattgaatactttctctaacaaaaagggggttatgagatgaaaatcagttcacttgtttttcctgttttattggccgccggattaattcccggcctgccgtcagccgaaagccatacgcattcgcacactcatgcggagccggcgaaaacggtgtatacggacccgcttccgaaagccgatcattttaaagatctgaaaggcccggtccaagttgaacagacggttgacacaaaaattctggatgagaacggcaagcaggccggcacgaaacgattcaatgccaatgtcagtcaggataaagcctcaactaaagccagcacgggctcccagaaggtcagagtgctggcggtggcggacgctgaataccgcgccaaatacagcgactggcaaacgcgaatcgtccagatcgtggagcaggcggatgtcgcttttaaccgtgatcacaacattgatttcgtcgtacaggccgtgcaggcttggaattcttccggctcaaacagttctcagattttatcgaatctccaaagcagcttcagaaatcaaaattatcattttgtcgtcggttttaccgcaaaatcgagttttgacgccggcggtatcgcgtatgtatataacggcaaaccgagcggcccggctttcagcgtgaaccttgatcaaggaacggccaacacggcgaaagcggcacagcacgagttttcccataacttcggacttcagcatgacgcccaaggcagcggcatccgctgcgtcatgaattatgattatgcctattccgtggatatttgggacagctcccataacagacagattgcgacaaacaaagcttggtacaaataatagaaaaagagccgctcccatggagcaggctctttattttgccgtgcgttccgttttgacaaaacacatgcagataataatgagaataaatgccgtcaatgccaagaaaggaatggtaatgaaaccgaaccagttaatatattcagatgagcaaggcacgccgtagacacacggcttgatgccgctgaaaccgggcaccttctgctcaaggtaatgcatggtcgatataaatgcgccgatgacggccatcggcagcacatattttttcacgcgcgtgtcaccctggaaggtggcgattcctaaaatcaggacaagcgggtacatgagaattctttgataccagcacagctcgcacggtatgaattttctgatctcgctgaaataaaggctgacgagcatggcagcaagagctatcacccaagaagcatataaaaacacgattctatttttcatttttcagctctttcttaatcgtttttgaaatctcatcatatttagagaagtcattaatcaccttgtcatttacataaatcgtcggtgtcgccgtaatgtttaatttatcattcaggtcagtgtcagctttcagctcttttgcgaaggtttctttatcaaggttttccttcagcttgtcaggatcaacctttttcgcggtgcttttgaccgttttttcaagcaatgcaggcgtgacccattcctgttcgcttgacggctgctcttcaaacagcttctcatggaaagtccagaatgatgccgggtcttccttccacacctcttctgaagcaagagccgccagacgcgagccgcttccgtggtacatgacgttcacaaatgaaaatttcacgtcgcctttatcgataaaatcttttttgattttcggaaagatatcgctgttaaatactttgcatgacggacatttgtaatctccgaattcaactaccgtaacaggcgcgctgtctttgccgagcacgggctgtcctttaatggaaggctgttcggcgactgtttcgcccgctttttccgtttggttgttaataattacgatggccgcaaataaaacgacaacgattaacgtcagaatcaccgcaaatttcgcagacgattgtttctttttcactcagacacctcattgtttttaaaataaaaaagaagcggatgccggatggcccgcttctctattttaccaagacaaccttgtttaagaaaaccctgaaaaacgaattatctttgacaattattccgctttcactctcatgacgcgcatcgcgttggcaacggcgatcagcgtgacgcctacatctgaaaagaccgcttcccacatggtggcgaatccgaatgcgccaagcaagagaaaaatgatttttacgcctaaagcaaatccgatgttctgccagacgatccggcgtgtgcggcgtgcaatccggatggcttcggctgcttttgacggctggtctgtcatcaggacgacatcggccgcttcgacggcggcatcagaaccgagagcccccatggcagctccgatgtcagctctggcaagcacaggcgtatcattaatcccatcgccgacaaacatcagtttttcattcggtgaaagcgccgcttcaagttcttcgacgcggtctaccttgtcacccggcaaaagctctgtgtacacgtcatcaataccgagctcgaggccgacagcttctccggtctgctttgaatcacccgtcagcatcactgtccgcttcacgccgagcgcttttaaattggcaatggcctgtttggcgtcctctttgatttcatcggcgatcacgattgcccccgcatactgctgatccacggcgacataaacgacggttccgttattttcagctgtgccggaagcgatttgttcttttgccagcagtttttgatttccggccaaaatcgttgatccgccggttttcacccgaatgccgtgtccgggtatttcttcatattcttcaatctcctcagccgcgagcggttgattgtaagcttcgcggatggaagaagcaatcggatgattggaatggacttctgcaagcgcggctgcatgaagcaggctgtcattcgtaaatcctgccgccggtttgatatcagtaacggcgaaattgcctttcgttaaggttcccgttttatcaaacacggcgtatgccacctgattgagcgcttctaaatagttgctgcctttcacgagcacccctgctttagacgcagccccgataccgccgaaaaacccgagcggaatggagacgacgagtgcgcacggacaagaaatcacaaggaaaatcagcgcgcggtacacccagtcggatagcgcggctgaaggcacgagaagcggcggtaaaaaggcgagaagcaccgcaacaatgacaacggccggtgtatagtacttggcaaacttcgtaataaagttttccgttttcgctttgcgtccggccgcattttcgaccagattcaatatttttgacacggcagagtcttcataccctttagaggtttcaatatgaagcacgccgttctgattcataaatccggccatcacctcttgccccggctccgcttttctcggcacggattcgcccgttaaagcggatgtatcaaccatcgaggaaccgctcagcacctttccgtccagcggaatccgttctccgggattcacgatgatgacctgtcccactttgacgtcctgcgggggaacggcagccatgccgttttccgttttcacattggcgtactcaggacggatgtccaataacgcgctgatcgattttctggatcggctgacggccgctccctgaaacaattcaccgatctggtagaacagcatgaccgcgacgccttccggatattgatgaatgataaatgcgccgattgtggcaagcgccatcagaaaatgctcatcaaatacctggccgcggacaatattttttcccgctctggctacgatatcgccgccgatgatcaaatatgaagcaaaaaagagcagaaactcaaggacggcgcccgtgtgcgcgaagtaagcgatgacggccaaaacggcgcccgccgccaatctcactaacatcagctgcagctttttgcggtattcatcctcaccgggtttgtcttcgtgcttcgaacgaacggtcacatgaggatcaatggactttacttttttcgcgacttcatctttcatccattgctcgtttttcccgccggctgagaccgtgatggtgcttgccgcaaaattgacagcacagccgtctatgccgtcaatggcttttacgccgttttctattttttttgcacagttgctgcaatcaagtccgtctaatacaaattcacctttggctgctttcattttcgactcaccctactttccgtaataggattcccataacatcaatacaggtaaacgaatttatatatatgagcatatactcatataagtgttttctctattatatgcaggctttgaataaagtgtcaataaaaaagacaaaaccggcatcagccgattttgtcttttttcaccttctgtaaacgcaaagcattaagcacgaccgataccgagctgaacgccatggcggcgcctgccacccacggagccagaaagccggctgccgcaatcggaatgccgatgctgttgtagcccaatgcccatcctaaattctgcttgatgtttctcatagtcagccggctcatgccgatggcgtcggcaatgccgttcaggtctccgcggatcagcgtaatgtccgccgcttccattgcgatatcggtgccggtgccgatggccattccgatatcggccacagccagcgccggagcatcattgatgccgtcaccgaccatcgccacgcgccggccttctttttgcagccgggaaatttccgccgccttttgttcgggaagcacttcggcgatcacgctgccgatgcccgcggcttttgcaatggcttccgcggtctttttgttgtcaccggtcatcatgatgacgtcaagccccatatcattcagacgtttcaccgcggccggagatgtttctttaatggtatcagcgactgcgataagccccgccgctttgccgtctgccgcaataagcatcaccgtttttccttccgcctccaagcgggccatttgcggaagcagcgcttcatgttcaatatgctctgattccatcagccgtcttgatccggctagaatcgttctgccgtcagcctctgcatagattccggaaccgatccgggcttgaaaccgggtgagtttcgggatggaaatcccccgtttttcggctcctgacacgatggcttctccgagcgggtgctctgatcccgtttcggcggccgccgccagccgcaggagttcctcttcgttcattccctctgccggtacggcatctgtcagaaccggtctgccgtttgtcaccgttcctgttttatccagtacgattgtcgtcagacgctgggtcttttctaaatgctcaccgcctttaaagagaatgccgaattcagctgcacggccggagcccgccataatgctcgtcggagtggcgagccccagtgcgcacggacaggcaatgacaagcacggcgatgaatttgccgatcgcttcagaaaactgtcccggcgccgcccatacataccaaatgagaaaagtcagcacggccagccccagcacaatcgggacgaaaatgccggaaatgtgatccgcgagccgctgaatgggggcttttgatccttgggcttcttccacaattttaataatgtgtgcaagcgcggtatctttcccgacattcaccgctctgattttgagaaagccgtttgcattgatcgtcgcccctgtgacggtgcttccgggagacttatcgacaggcatgctctctcccgtaatcatcgattcatcaatcgcggaatggccttcaatcacttcgccatcgacaggaacgcgttctccaggtttcacgtatacgatatcccccgtccggacctcgtcaatcggaatcacctgtactttgccgtcccgctcaaccgccgccgtcttcgcctgaagcttcattagctttttaatcgcttctgatgagcggccttttgctttcatctctaaaagctttccaagcaatatcaaagtcagcaaaatggcgctcgtttcataataaagcccctcagcatgtccgtctcgcccgagagacgcaatcgtcatgtacaggctgtatgcgtaagcggccgtcgttccgagcgcaacgagaacatccatattggcgcttttgtttctcagcgccttgtacgctcccgtataaaaaggccagccgatgacgagctgcaccggggtggcaagcgcaaattgcagccacggattcatcaggatatccggcatccagataaaagaagtaaaagaaaaatggctgaccatcgaccataaaagcggaaaggagagaacggcagaaaatatgagcctgatcagctgctttcgctgctctttctccttttgggataatccgccgtctccatcaaccgctttcttcccgtctaatcggtagccgagttttgccacggtctctttcagctctttcggcgtcacctctttcggattgtattcaacggtgactgtttccagggcgaaattcaccggtgcgctcacaacgccctctgttttgttcaggcgcttttcaatccggttggcgcaagcggcgcacgtcatgccttcaatctgaaaatcggctttttccgtcacgacgtgatagccgagtttttcaattttatcctttatggcgccagcttcgattttgtcaggctgataggaaatatttgagatctcaagcgcaagattgacggaagcgtcattgacgccgtccatccgtttcagccctttttcaattcttgaagcgcaggcggcgcatgtcatgccccccacttgaatggtcatttctttcggttcactcaatgtcctcatctctcttcataaaccccacgagggtataattatgataaaagaaaaccgcgcccgttcccgcagcgcgataaaccttatacgacgtcatacccttgatcttcaattgcgtcttttatatctgatacggagactttgtgctcatcaaacgtcacatccacctgtccggcttccaatttcacctgaaccgccgtcactccgttcagttctcccactccggtctctactgcttttacgcagtgctgacaggacatgccttccacttgcagtgttttttgttccatgatgattccctccacgtcttgttttttcttttttatgttaccatacccctgtagggtatttcaaaacattttattttacgattttgcgatttttttcacaacatcaagcagctcggcaatcgcctgctccccgtttccgctctcaatggcgccggctacgcagtgatgggcgtgatcttccagcagatgaaacgcgactttctgcatggccgcctgcacggctgaaatctgcacgagaatatccacgcagtatcgttcgttctccaccatattctgaatgcccctgacttggccttcaatccgtttcagccggttcagaatctggtctttttccttggcgcttttatgatttaacgattgatgctcggtatgtttgtccattttccacctcggtttttttcttcgttatcttcattatacagacttgaaaatccggtgtaaaaaattttcaacacacaagttttaccagtacacccgcggggtatataatgttatcacatatcaagagggggaaattcattgaaaacgatacaggttggcatattgggatatggtttgtcgggtaaagtctttcatgcgccgcttttggacgtccttgatgattatcagatcaaaaaagtcatgacctccagaacggatgaggtcagacgtgatctgccgggggctgaagccgtgcgcgcgattgaagacattaccggtgatcctgacattgatctcgtcatcgttacgacaccgagcggaatgcattatgaatcagcgatgaaatgtctcctggcgggaaaacacaccgtcgtggaaaaaccgatgacggcgacttcagcagaagcggaggaactgagaagaacggctgaagataaaggcgtcttactgagcgtgtaccacaaccggcgctgggacaatgactttttaacgatacaaaagctgattcgggacggggcgcttcaagacattcatacatatcaagtcaactacgatctgtacaatccggttgtccaagaaagatggcgcgaaaaaagcggacccgccacgggaacgctgtatgatctcggttcacatattattgaccagacactcctgcttttcggaatgccggaatccgtcacggcacatgtgatgaaacagcgggacaacagtgaaaccgtcgattattttctggccgcgctccattacggcaaacttcaggtcattcttcaatccggctctatgaatgcggcaaacggcccgcgctatcagattcacggacggaatgcaagctttatcaaatacggaaaggacggacaggaagaggcgctttcagccggccaaaagccgattgacgacagctggggcgccgatgaccctgacaacttcggagagctgacaatcgcagcggatgaaaaaaggcatacagaaacaatcccctctgagaacggctcttaccttacgtactacaaactgctggcggacagcatcttaaacggaaaacagcttcccgttacggcaaaagaaggcatcgatgtcatccgtgtcattgaagcggcgatgaaaagcagcgagcaaaaacggacgattgccctttaatataaaaaacctcccagccgtacggcggggaggttttttttaagatcagaatgattttccggcttctttcgcgcgggcaatcgcatcttctttaatttgctgtgctttattcggttcagcattatggccttcaacgattaaaccgtcaaaagaaggaacgccgaagaagttcatcatgatgccgatgtaacggtggcccatttccatgtcagccgccgggccttcagagtaatagcctccgcgcgcctgaatgtggagcgcttttttgtcagtcaacaggccgatcgggccttgctctgtatatttgaatgattttccggctacagccacagaatcaaggtacgctttcataacaggcgggaatgagaagttccaaagcggtgtgacgaatacgtatttgtcagctgacgcgaattgatcgctcagctcgttcagacggccgactttcgctttttcgttttcagaaagctcttcaaatcctgtgccggattgaagttttccccagccgctgaatacatccgcgtcgatatgaggaatgttctctttgtaaaggtcgatatgtacaacctcatcattcgggtttgattctttataagaatcgataaacgcttttcctgtcgccatgctgtaagatgtcttttcatcatgaggatgagcagtgatataaagtacttttgccattgtaaacagccctttcgttttcaaattacacacacatttattatgaaatatgaatgtttttttatactgatcagttctgtaataattatagttacaaaaaattcttttcgcaacaataatatctcgaaatcagtatattttttaaaaaaggctgtaatgacgggaatggcaagcagcagaaaaagcagaaacatttagtttctgctcaaaatcggatttggtttgcagatcggaatatccaacccgagattcccccgcaatgtatccgccggatagctttttcggtacagcccctttttctgaaggatcggtatgacttgatccacaaaggcttcaagcatgcccgggatgtcagagtgaatgataaacccgtccgccgcttcccgctgaaaccatgtttcaattaatgatgccacacgttccggtgtcccgataaagttcgttcgcggaaacgcggcttcgcgcgccacttgacgcagcgtaagattcctggctttagcctctcttttgatacggtctgtcgtgctttgaaacgcgtttttcccgacgtcgcccaaatcaggaaacggctcatccagcggaaaacggctcaaatcataatcgtcaaaaaatctggccacatatttaatggcgttctctatcggtatcagctcggcgaattcctgatatttcgcttccgcttcttcttgtgaaccggctataatcggactgattcccggaaagatccgcagcttggaagcgtcgcggccgtaatccgccgcccgcttcttcacatcatcataaaaagctttcgtttcctcaagtgaattggagtgcgtaaagactgcatcggcattacgcgcggcaaacgaccggccggtttctgaagaccccgcttggaaaacgaccggctctccctgtttggaccggccgatattcagcgggccctccacttgaaaatactcgcctttatgatataggcgatgcagtttgtcaggatcaaaaaactgcccggtttctttgttgcggacgaaggcatcttcttcccaggaattccacagaccgcgcaccacgtccacatgttcttgagcgatgtcgtagcgccggctgtggtcgggaagactttctttgctgtgattgcgcgcggctcccgcctgcggagaggtgacgagattccagcccgcccggccgccgctgatatggtcaagagacatcagctgtcttgcgatggtaaacggctcagtgaacgaggtggaaaatgtgccgattaaaccaagatgggttgtagaggcggcaagcgccgataaaatagtgatcggctcaaaccgatttaagaaatgcgggatggacttttcagaaatgaacaagccgtccgcaataaaagcaaagctgaacagccctctttcagcagtctgcgctttttgcctgtaaaacgccgcattcgtgcttgctgtcggatcggcgtcgggatgacgccagccgtccgttgtgccgccgacaccgtgaatcatggctccgaattgaattagatccgtccggctcattttctctccccctttttcccctcgtaatcggcaagcgcccgttctacatgatcaatgccgacttgagtaacggcctgatacacacggctgtcaccgctgccgatttcaacgacggggacatgacggatgccgtacttcgtctgcagcacgtcacgcaattcgtcccgttctgtcacatcaattgtttcgtatgcaacggctttttcccgcaaatatcctttcacttcatcgcaataggagcagccctgtttgctccagaccactacgtttacttcatgactcatgttcatccctcctataattgtggggccggctgcaccgcttcgcttaacagccggtaagacaatcgtttttcctcagcgtttttgataggcgacaaaatcacaaaatcggtaatgctgtattgaacggataatcgtctcagctcggcggcggtctcttcttttgtcccggcaatcacacccgtcttttgtgtgatcagcttatatggctgcgtgacttgttccagaaacgcttccgcttgttcccgggaaccgacattcacctttttgccgtcttcgagaatgattttgaccgactcacgcgatacgacgtgtttttccgcttctgcttttgtatgcgcggtaaataccatcggcgcaaggtgaaattccgccttcgatcctttcggcagatgctcgtcaaaggcgtggcgcgctttttctaacgcagcctcttcaccgtttatgaaataggcgaaaacgaaggaaatgccgagtttggccgcggatatcgcgctttccgcgctgctgccgagcaaaaagatgtcaggcgcatactcagtatgcggcgtcggccgcaatgacgcgtagcggtgcgagtccggaaaatcatttcgaatgaaatgagtcagctcctcaagcttttcttcaaacaaacgggcgggctggataagctcccgctgcagcgcatcggttgacagctgaaatccgccgggcgctttgccgacaccgagcgccacacggccgggagcaagggcggacagaacccggaactgctccgccactttataaggactgtaatgctgcagcatcaccccgcctgatgcgagacggatttttttcgtgcttgcggcaagataccccagaacaatttccggcgctgatcccgctatctcttcattgttatgatgctccgccgcccagaaacggtcatatccgtattgttcggcctcctgagccaatttcaccgtttgccgcaaggcttcttctgcggtttggttttccgcggtgacactttgatctaaaatgcttaaacgaatcatacgacaggctcctttatgcgctcttttatgtcataaccgtaatcaggcagcacgcggcggaggaacttcttcgttctttcttttttcgtcttgtgaaaaacttcctcaggcgttccttgttccacgattgctccttcatccataaacacaattcggtcggacactcttctggcgaattccatctcatgtgtgacaatgatcatggtagcgccggtccgcacaatgttaagcatcacctcaagcacctcgccgacaagctccggatcgagggcggcggtcggttcatcaaacagcatcacatcaggatgaatggcaagcgcccgggcaatcccgacccgttgcttttgtcctcccgacagttgattcggataggcgtgtagtttatcctgaagccccaccttggccagttcccgctcggcaatggcgtacgcgtctgtttttttcattttccttgcgaccgtcaggccttccatgacattttgaatcgccgttttatgcgaaaacaaatgatattgctgaaaaaccatcgctgtctgtttcctcagtctgagaatgtcttttttggcaggctttttgcagttaatgacttcaccgtgcagcgaaatggcgccctcatccggccgctcaagcaaattaaggcagcgcagaaaagtggttttcccggaaccgctcgggccgatgatggtcacgacttctcctttccggacacttaaattgatcccctttagcacgtgatgactgccaaaatatttctgaatgtttcggatttcgatcataatgcgcctccttgatatctggccgctcttttttccgccagactgtttacagcttcgagaatcagcgttaatccccaataaatcacggccgccccgataaatgcttccagaaacgcatagttatcggatgccgcaatcgtcgccgttcctgtaatttcaggcactgcaacaattgccgcgatggaagtggtatgcaaaaagccgatgcctatattggtgaagttcggcagcgatatcatgaacgcctgcggcagaattacgcgccgaatcaactggccccgcgtcagaccgattgaatatgccgcctccgcctgccccgtatcgacggccatgatcccggatcggagaatttccgtcatataagcgcctgccgttaatgacagtgccatgatgacaaacacggcgaccggaatctgattggctgaccagccgagatgaaacgcgcggctgaattgatcggcaatcagcggaacccctaaataaatcagcataatatggagaatcgccggggtgctgcggaaaaaagacacgtaaaacgctgagcaggccagcagccatttgatgcggaatatacgcaccgtgatattgccgagagctatgaaaaatccggcaataatcggaatgatcgtcatcgccaatgtaagcggaacggttttcaacatttgttttatcgcagtgccgataaacggaatgtccagctccactgttctccctccttttcagccgtgcgcactcatgtcaaaaaccgtcacaaggcgcgtctcatctttcttgattcgtttttcggcccatctgaagacacattcaaataaaagggcggccgcgtaatacagaacagacagcgagatatacacttcaagagaatgattgctcgatgtaatcaaggtctgtcctctgcccgacatatccatcaccccgatcgaaaaagcgagtgatgtatcttttaagaaaccgatcaccatattcccgatgttgggaaaggcctgcacgagcgcctgcggcagaatgatgcgccggaatgtctgccctctgttcagcccgatgctgaacgccgcctccgcctgcccgcggccgacgctgttcacacctcccctgatgatttcggccgctcttgccgcgctgctcagcgcatacgtggcgatggccgcatacaaagggtccattttagaggtatcaattccggcgagcgccgtgagcgccggaatgccgtaaaatacaatgaacagctgcaccatgataggcgttcctctgaaaaaagagatatacagcttcgcaaactgattcaaaacgggaatgcgatagatgcggggcagcgccaaaagcagccccaatagaaagccgaacagcaaagacaccgccaatatatacagcgtgacgggcaaatacccgagcaatgtcggcacaaaggacgcgatcatactgatatcaaacgctttttccattgccggtccctctctttttcacttaatattgctcccttgaataatccgcgccgagccacttttcactcagctttttaagcgtgccgtcatcaatgatttccttgagcgctttatcaatgtcatcgctcagcgtttgttcatttttgttaaacataaagaacactttggcatttgacagcaccccgccgaccgttttttctttgatcgcgctcgttttgttttgaaaatcgacagcaaacggcgttgaaatcgttgcatcggcgcggccggatttcagctgattggccgcatcgtttgaaccttggccggcataggcgatttcaaaaggactgccgtgtttttcattccattttttcaggacaagcgcgccgtttgacgtcggacttgtaatgacccgctttcctttcaagttattaatgccgtgaatgtccccattatcttggagcaccgtgattttcagcgggaagttgttatacgcgacttgattgaacagaaattttttctcccgttcggcgcttttctccatttgatgagccacgatatcgactttatgctggccgaggctgacaagcaggttggagaaatccatcgttttaaaggtaaatcgatagtccggcaggcgcctgtcaagctctttcaccagctcaacgtcgtagcccgtcaatttgcctttatcatcaataaagcaaatattcgaaaattgagtccccgtgccgaccgtaatgttcttcacgtttttctgattgcctgatgccgcctcccctcccgcgccgcaggctgataacgccgccgttgccgcaattgttaatgacatgaccgccaatcttattttcatgtgatcgccccgttttctgcttcaattatttcgtgaaacttgattttgaataatccgcgccgagccatttttcactcagccttttcaatgtgccgtccctcacaagcctttgaatcgcccgatccgtatcgtccgccagggtttggctgtttttattgaacataaaatacacctcggtatcgagcagcacatcaccgaccgtcttttgtttgaacgcgtgcgtcttattttgaaaatcgacggcaaacggcgtggatacggtggcgtcagcgcgtcctgtctcaatttggttcgctgtatcattgccgccctgcccggcgtatttcaaatgtatcgggctgccgtgggttttgttgtatgccgtcatataatccgccgcgtttgacgtcgcgccgacgatgacggttttcccttttaaatcccggagcgtgcgtaccgcgtcattatccgccttcaccgtgatgtacatcggcgagtagttatacgggattttgtgatacaaaaagcgtttctcccgttccttgtttttcgccatattgtgcgcgatcacgtcaattttccggtttccgagacttgtaagcagattcgaaaaatccatcgtcttaaagacaaatttgtattgcggcagctgttcatcaatggctttcatcacttcaatgtcatagccggtcagctcgcctttttcatccataaaagcaatgttcggaaaatcagttcccgtgccgacgatgacggtctgcacgccgctccccgcttttgcgctttctccttgcccgcacccggccagcacgccgagcagcagaagcagacagccggctctgatccgttttttgatcattgcgcccagctcggtgtgcctaacagcgacgcgtcaaaccgctccggtatgagcacctttctcatcataactccgatgtctccgtctttctcctgctcaaaatacacttcatatcccctccgtctgtacatatctacaagccagggatgcttgcgcgccgaagtgccgagcgtgatggccggggccttcagcgtatcccgcagcacatgttcctccacataagtcaaaagtttgctgccgatgccctgccccttcagctcaggaagcgtcgcaaaccaccagacaaacggatattttgacggaggcgtgtcactctcccacggaaaacggatcgtaatggttgaaagaagccgtccatcccgttcgagcacgacggctgaatgattttcaatattttccgttaccatatcgatgtcggcccgcgccgacggccagtcaatctccaaattgcggatcggctgaaacgcgctgtacagcagctctaaaaactccggcgcatcctttttctcagccaatcgaaatatgtcttcactcattccggtcactctccccgcaaaaaatatataattccaatttgtttactaagctttgattgtttatactataaagcaaactgatttgtttgactaatcaaaaaaagtaaaggaaaggttcaagaaaattaatgaacagccgggaggggatttcgttggaactacgaaccattaaaacgtttcataccatcgtacagtcaggcagcttttataaggctgcagaaattctgaactactcacagccgacgatttcaatgcggattaaacagctggaacaggatgtaggcgcgcagctgtttgaacgtggaaagaagctgaagctgacaagggcggggcggctgtttcatgagcgggccgggcagcttctcgcgcaatacgaggtgcttgaccatactctggccgatatcagacagggccaggccggccttattcagatcggcatatccgaaccgacggcaagcctgatcttccctgccgtgctgcggggtttcttaaatgattatccggacatgtcggtcaatgtcagcgtggatgatgccaatacatgcagccgcaaactgctggagggcgctattgattttgcggtatgcggcgagccggagctgattctggaaaattatttcgatccgtttttccatgactcgctcaatgtcatcgtgtcagacagacatccccttgccgccaaagcaagcgttaatctcgaagatttagaaaatgaatgcctgatttttacgcccgccaattgcccgatccggattcaaattgaacagcacctgcagcgggccatcgggagccgctatcgaaaaatggagctgaccagcagcatggctcatcaatactatgtcagggaaaatatcggcgtctcaatctttacggcgacggcgcattcagagccgatcgagggcacgaaggtcattccgatccataacttaacaatttcaccgcctgtcgggcttttgacaaaccaaaaagaagagcactttgactgtgcaacaaaagatttaatcagcaggatcatcagccggtttcagcgtgatccgcattaaaaaaacccccgccactttgcgggggttttttatgttcatcttatataatgctccgcaccaagccgccgtcgatccgcaatgcagatccgttaatggcagacgacagcgggctgcttaaaaaggcgacaaagtgggcgatctcttccggacggatcaaccgctgaatgatggacgtcggacgattttccttcataaatcgtctctccgcttcagccgctgtcaagttttcaccgggataaagcgactcaagcattgtttcgacgccctctgttttcgtggagccgggcatgaccgtattcaccgtcacattcgtcccttccgtgagctcggccaggctgcgtgacagcgacagctgcgttgttttcgtagcgctgtaatgagccatttcctgagaaggcatgacggccgcttcactcgcgataaagatcacccgtccttccttccgctcaatcatccgctttgcataccggcgtgtcagccgcacgccgctcatgatattcacctcgaaaaaccggagccactcttcgtcaggaatatcaaagtattccgcaggttcaaagattcctaaattgttgacgagaatatccacatcaggatactgctgaaaaatcgcgccgcatccttccgccgtgcctaaatcaaacgcggccggatagagacgggcatccggcgtctgtttctctagttcccggatcgtttcgttcaccttttcttcacggcggccgttaatgatcacggccgcaccttctgcaatcagcgaagccgcaatcgccttcccgatgcctgacgtagatcccgtcacaagcgccgtcttccctttcaactgcaagtccatcatccattcctccctatcgcaagtctcttcttatatatggacagaaatcgaaagcctgaaaccttccgtccctattatcggatagaaaaatggatgaggggaagtacgcactttttagtgcctgtccgttgtcccggctgacggctgatcaatttgaatgaaaaattcaccatctaattctgcctgagcctcttgaaacagctccaagacatcatcagcatccgaacccaattccttctgactgatctcaaaattcttccacaccaaagtcagcggaagttcgatccagcctgtcagacaatcccataaggcgttcagattttcaccataaaagtccgggaaatctaattgatcttttaagattcggtgtaaagcttctgtgcttgtaacatcttttccgtctatgatgacgatttccatttacattcactcctttttgtcggcataaaaaaaccgcagtgcgtcatgtgacggcactgcggttcctctgttatgtatggagacggtgggagtcgaacccacgtccagaaacatcgattacttaagcgtctacgagcgtagcctgcatatttcgtgtttcactcgtcttcatgcctgcgggcgggccttccgagagctagtctgtcagtctcttcttacgttctcagacgggaacgcaagcgtagcctacttggatgtgctcttcacggacacataggcaatgtcaggaagagctcgctgcgtttattaggcagctagtgctaagttttggttaaaacttttagttttgccagttatatttaggtgcgtgttaacgagatcgcctctcggctcgcagctcaagctcgatccatccctgtcgaatccgtaacgtccccttgttaagggtatacgggagatctatcaagctcttgctcaactggctgtactgttattataccatgatcacaggcaaattcaattgggaatatcttcaataaacagcctgtgaatctgatgtgtgaacagtatagcacagggcatatcatcacatcaaggctcaggcatcagaagcctttttgtctgtctctgaacgctctttcgatttctcttttggcgtcttttcgttttaaatcttcacgtttatcgtatgttttcttcccttttccgaggccgattaatactttggcgaagccgtttttcaagtacagcttcagcggcacgagggaatagcctttctctttcgtcaggccgatcagcttattgatttctttccggtgcatcaaaagctttctcgtccggagcgggtcgtggttatagcggtttccctgctcgtacgggctgatgtgcatgttgtggaggaacacttcgccgcgctcgattttcgcaaaggaatccttcatgtttacgcggccggcgcggatggacttaatctccgttccctgcagcacgatgcctgtttcataggtttcttctataaagtaatcatggtttgcttttttgttttgcgataatactttgcctgatccttttggcatgccttatcctcctctctccgcaaaaaccgttcatgtgtgcgatacgctttattttagcaaatggagcgttccgcgacaatgaaaatgcggcttgcgaaagaaagcaaacagagcattatgccctatttgcttttcgcatttacttcttctttttgcgtttttgtttcggcgcgttttggaagccgcgttttttctttttcttcttcggttttgtaaaccattcccctttttcctccgatttcggcggtgaagccggggtattgctgtttaacacgcgtttccgcgccggtctgcctcgttttctgcggtcgcctgttgtttctctcggacggcgggtgcctttcatgccgacaatttcaaagtcgatgtttctctcatctttattgacgtcgacgactttgaccgtgatttcgtctccgatgcggtaaacgttgcccgtgcgttcaccgatcatggcgaaatgctgctcgtcaaaacggtaataatcatccgtcataaagctgacgtgcacaagcccttcaatcgtattcggcagctcgacgaacattccgaaattcgtgacggaactgatcatgccgtcaaattcctcgccgattttatcaagcatatattccgcttttttcagatcgtccgtttcccgctcggcatcaacggcgcgccgttccatcgttgacgtatggtcagcgatttccggaaggcgttcggcccacttttcctgagttgcttcgtccgattgtccgttgatcaaatacgttctgatcagcctgtgaacgattaagtcaggatatcggcggatcggcgatgtgaagtgcgtataaaattcagtcgccagcccgaaatggcccaggctttgcgggtcgtatttcgcctgcttcatggaacggagcatgaccgttgaaatcaccgtttcttccggacggtcccgcacttcatcaagaatgctttgcagcgcgcgcggatgaatgtctccggctttccccttgacgatataaccgaatgtcgtgacgaactccaagaacttttgcagtttttcggcgttcggctcttcgtgaatccggtaaataaacggcacgttcatccaatggaagtgctcggccaccgtttcgtttgcgacaagcatgaattcttcgatcagcttttccgctactgagcgctctctgatgacgacgtcttttacggcgccttcctcatcgacgagcaccttcgcctctttgaaatcaaaatccacggcgccgcggtccatccgtttcgcccggagaatttccgccagacgttccatgtctttaaacatcgggacgagcggctcatatctttctttcagctcggcgtcgtcttctgtaaggatccggttgacatctgaataggtcattctttccgtcgttttgatgacgctttggaagatctcgtgctccgtcacctgtccctgctggttgattgtcatttcgcaggaaagcgtcagccggtcgaccttcggatttaaagaacagattccgttagacagtctgtgcgggatcatcggaatgacccggtcaaccaagtacacgcttgtccctctttccagcgcttctttgtcaatcggggaattctccgtaacgtaatggctgacgtcggcaatatgaacgccgagcttgtagctgccgttatcaagctttgtcacggtgacggcgtcatccagatccttcgcatcggcgccgtcaatggtgacaatgacctgatcgcggagatcacggcggtctttgatgtctttttcatcgatggtatcgggcgtgcttgttgcctgctccatcgcttcagccggaaaatctcccggcaggccgtgcttatggatgatggataaaatatcgatgcccggatcatttttatggccgagtatttcaacgatttccccttcggcgttcattctgccttcaggatagcttgtcagtttgacgacgactttatggccttccgcagcgccgttattggcatgtttcggaataaaaatatcactcgtgattttcttatcatccgggatgacaaagccgaagcttttcgtttctgtgtatgtgcccacgacgcggtcgatgcttctttccaggatgcggatgaccgtgccttcctgtctcgatccgcttgactgggaattgagccgcaccatgacaatatcgccgttcatggccgtattcagctcgttcggcggaataaacacgtcgcttaaagaggtatcctccggcagcagaaacgcgaagcccttcgcatgcgcggaaatttttccttttactaaattcattttttccggaagcccgtagcggttgcttctggtgcggacgatctgtcccgtctcctcgagcgccaccagcgcttttaccagctctttaaattcatcggcttccgtgatgttcagcatctcctcgagttcctgaatggtaagggcttgtacgcctcttccttcataaacgcgagaagacggtccataaacgcttctttttccattattcgacctcctgtttgttaccaatcgagtttctctaaaaattcgtacacatcctgatgaacgaggtcccgttctttatcgagtgtaatgacatggcctgattcttcataccatttcagctgtttgtcgtccgtttccacctcgttgaaaatgatgttcgcactttctgtattaatcatatggtcatgccgtgcctgaaccacaaatgtcggggaatagatcatgtcgacgtttttgcgcacatcggcaatcagctcctggagcgatttgagcgtattcatcggcgttttttcaaactccttcatttccttttcaatctgctccggctgttttccttcgaattttttataattgcgcgcgtaggagagaactccttcgtacataacctcttcacttttaatgtgcatcggcgcacacataggaacaattccctttatgggtacagtgtaacccaatttcaatgaaaaaaccccgccaagcgacagtccgcacgccgcaatgttttcatagccttcagaccgtaaatactcataaccgtccatgacgtctttccaccaatcttcaggtcccgtatgtaccagctcttccggcggaacgccgtgccctttatattgaggcgcgtgacaagtgtagccgcgctcattcaagtagcggccgagcattctgacgtctgccgtatttcccgtaaatccgtgcagcagaagcaccgctttgtctccgcctttaaatgtaaatggttttggtgtcacaattttcatgctcataaccccttttttgcacattcaatttagttttccacagttttgcgagaaacaaacgccgtctctcaacaagaaaaaggcctgatattaaatcagaccttatacaaacattgccttatacgatatacgctagcgaaatcgtcaacacgaaaaacaagactgccagcacaacggttgtgcggtgaagaatcagatcaaggccccttgctttctgttttccgaaaagctgctccgccccgcctgaaattgcacccgataaaccggcgcttttgctggtttgaagcaatacgacaataataagtgcaatactgacgataaccaataaggtaatcaataatgtgtgcatcccatacacctccagactgactggcctacattgcttctattttacatgaaaaacaaaggcatgtcacgccgtatcggtgtacatcatgtcagaaaaacggaaatgcgtttgaatcttccatcttcattgacttttgtcaacaaagtcgtagtaaaaaagatcttcaaatttcatgtcaaagtaatagagcatttttccgatgaccagctggcccggccttcgctctccattcagtacacggctcagtgtggcgggagatattccgatctccagggcgagctggtttaacgagtagtcattattgaccatatactgcagcacataatctcttctgatctgtatcttttcgaccactttcttcaccttccgttctgtcaaatactttctttcttatacataagatacggcttttgttaacttttgtcaatacttttccagcctggctattccctttagtcaataaacatactagaatataaatagaccgcgggagggggagagactgtggaaagcttcgggaaacaattgcggacattacgggaaaaaaggcatctgacagtgaatcagctggcaacgtattcaggcgtcagcgccgcgggaatctcgcggattgaaaacggcaaacgcggagtgccgaaacctgcaaccattaaaaagctcgcagatgcgttaaaaatcccgtatgaggaactgatgcagacggcgggatacatagagaccgtccaggaaacgagagccccgtacgacacgggctgcaccttgctggaaaaagccgaaacgtatgagctgcatgatttatcccttttggagcgggagaactggcggcacctgtcgaaagaagacttggttctgcttgataaatactttgcgttcttatcggcggaagccaaaaaaagaacaaatgaagactcatgactttgcacatgtgaggcgatcttattgaacacattcggaaagcaattaagagagctgcgccgcgcccggaagcttaccgtcaatcagcttgccgtctattccggcgtcagctcggcgaccatttccagaattgaaaacgggcaccgcggcattcctaaacccgcgaccatcagaaaattggcggacacattaaaaatcccgtacgaggagttaatggcgcgggccggacacatcaaggcatttcaggaggaaatccgtgaaacctccgaaagctatcaatccatctgcgccatctatcagaccgccgttgacagaggcgcggagcatctgccgctgtttgacagcaaaaagtggcagcacttcacaaaagaagatattgaaagcgtcagcaaatactttgattttattgcggctgaagcgaaaaaacgctccccggattcctcatcctctttttgatcctctcctcaacttaacaagcgccagacgtacgttccctccgattttgcggtataatagcagaagacgaggtgaaaaagcatgaaccaatcagaaatgtgccccagattcgaaaaagcggtcgacatcctaagtaaacgctgggtggctctaatcgtctttcagttattgaacggacagcagcgatttagcgaaattgaagcggcgcttccgaatttaagcggaagagtcttgtcagaacgtctgaaagaacttgaaacagaaggtgtcatcaaacgggatgttatccccgaaacgcctgtccgcattgagtattctttaacggaaaaaggctgcgcattagcccctattttagaggaaatttccaagtggtcttcaacatggattgatccttcctgataaactcttttccgcataagcggctgatctctcaaacggacagccgtttttatttttgcttttcttatacagaaaaacaagccctcaggcgtgcagggcttgtttttgtctgacgccttccagcggaattcgaatctccgcccgggctcctccagactcctgattttcaagtattaattcgccgtgatgaagatgtacgacgtgatgggcgaatgtaagccccatgccgtgatgccccgccgaatgtctgcttttatcctccgtgtaaaaaagctgtgtcgctcttttcagcgcctccggcgagaacccgcttccgctgtcggatacggcaagatggagggcggaatcggtgcacaggacgtccacacggatttcccctccttccggcgtatagtcgacggcatttgccgcgatattcatgaccgccctgtggagcagctcatgatcgatcggcgcttctattcggtcaattccccgttcgctgaggacgagatccatctgcttcggccccgcaagcgccgccgcgtcacgatatatgttttgaatccactctttgaggtcggtatattcgacatgaacggcaactgcctcctctgctttggaaagctggatcagctgtccgacataatgctcgattttgtttccggcatccaggatatactgcgcatattccgcctgctcctcatcaggttctgttaactggagcagctcggcatttcctttaatgatcgttgccggaattttaatatcatgcgcaagcgcgccgatctgttctttctttatccgctccgcctcccactgcgccgccagagatgcctgaagcgcgtctttcattttcagcagagagtcaatgacatcgtcaaattcttttatacgcgacctttttggattgatatttaaattctgtttttgaatgcttgccgtaatggagctgagtgtgctgaaatgccgtctcagctgattggcgaaacgcgtcgtcacgataaaaacagtcaaaagaagcaaagtgatcagaatcgtaagacccgtccattcataattcggcagatagcgccttaacagcggcgactgaaattccgacctgagtgaatattggagaacgccgtattcatctttccgatttatcaccatgaatcctttttgagcataattaaaatacggcgtatgctgaatcttttttctggcgttggccgcatcttgttccgtcatcgttccttttgtcatccgctttgtttttttatcaaaaacggcgtatgtcatacctgcggggatcatgtcttctgttatcttttccgctgatttcaggcggggtttgatctgttccgcctcatgctcgctgtagtttgcgggcaggatcgctccggcattcatggcaatggcatttaaggcgacgcataatgccgccacccccatcgtgctcagacacaaagtgatggtaaatttgacaagctctttgcggatgctggattttccttttgctattcccatttgtatccgacaccccacaccgttttgatcggatcagccccgtgttctttacattttttccggatggttctgataaactccgtaatggttgaatagagcgcatcgccgtccaagccgtacacttcctcgtaaatctgctcccgtgagaatgttctgtttttatgctgtgccagaaattcaacgattttatattcgtttttcgtaagaggcagtttccggtcatccatccatacttctttattgtcaaaatcaaacatgaagcctgatatcagccgtttcgtctgatgcttttcccgccgttcccttctgacatgcgcgtttacccttgccatcaattcctgtacgccgaacggctttgtgatgtaatcatcagcgcctgtcatgaggcctttcacaatggattcttcgtcagactttgccgttaaaaacaggatcgggctgtccaccagcggccgaatccgccggcagagttcaatcccgtccgttccgggcatcatgacatcaagaagaatcaaatcatagccttgaaaaaaatccaatgactgatcttccgctttttccagaatcgttactgtatgctgatcacgctgtaaaatgtttctgatcagaacgagaatatctttttcatcatcaattgctaaaatgtttgccaccggccgaatcgctccttgcctttattcatatgaacgccgcccttcccatcttctgcaccaatagaggccggccagacataatatcactatagaaaaatataacattatttctccgaatctcatatcgtatcttacataagggaggaactcttttttgactttgtcaaaatgcagcagtcctgcaaggcctgaaagcctcacgctccatgcccacggaaaaaaacgccagatgatatcgccaagtcccgtattcatgagcgccgccattaataatcccgcaccccctaaaagcccggacggtcccatgccgtactttatgccgacaaaaaaagacatcatataaagcggaatactgccggcaatcagccacgcccctccttttaaaaagagaagatacgggagatcattgatgtgaagaacaaatttcaaccccgccaaataaagacagatggcgagaccaaccgataacacattcaataggagcagcagaagcagcttgcccgcaaaactgacgattttagaatacggaaccgccagcatcatctgaaaatggcccgcctgttcctcgacagaggcagacatgccgcagacaatactgatgatcagagggtataaaacggcaatcgcgctgaaaaagacgctgtacagcatataagactcctgaacccttccatacatatataacaggaaaaatcccgcgcataaaaccggcgccgcagcatgcatccatatgagcggcgtgcgcttcatttttaatacatcggcccacatatatcgtaaaagcacggtcatgaccggtttcctccttttgaaaatgacactgcggaaacaaaacttattgcgataaaagaaagaatagaaagaataatagccggaatgatcacgtttccgtttaataagccgctgtttgcgggaagcggaattccgttcgggtggattccgagaatcggtgacatcagccggactgaccagctccacggactcagccaccacaatgaaccggacgccggcacaatgcctaaaacaaaggcggcgatcatattgatgagaatgactgccgtaaatccgaactgtctggcaatccataagcacaatgggatttcccaaagcgtcgtcagccacaaaagggagcttgcttcaacgcctttcagctgcagcgcagcaattgccggaaacacaaggccaagcaaaaacacgatgactaaaaagacgatttgcgacaggagtgaatacagcgcgatcaaacttatttttgagaaccatatgctttttaaatctgccggcaatgagtacaccgcgcggtcattcgctgattttttctcttttttaacagataaaccgcacattagagcaatcatgagcggcatgaaaataaccgcccaccaattgaacgtgcccgtcataaaataggccgcattcagcagaaaagaaaaagccgcgttcagaagcggaatcagaatgatcagctttctgataaatgttcttttagatgtaaggtgttccgcctgcatgtactgaatcattttcctgtccccgctttctcccgtgttgatttgacaacctccagaaacagccgctccagatcgtcttcccggctgatttctccctgatatcctaaaacgccgtcactgatgattccgatatggtctgcgatctgctccacttctgataacaggtggcttgataaaatcaccgtcattccctgtccgggcagggagcggataaattcccgcaaatcctgaatccccatcgggtccaatccgtttgtcggctcgtcaagaattaagagcgacggacggtttaataatgccaacgcgatgccgagacgctgtttcattcccatggaaaattgtccggcgcgcttttttccggttcccgttaatcccgtaatttccagcacctccgcaattcttgaatcaggcagtccgagcatcacgcagcggactttcagattttcagcggctgtcaggttgctgtaaagcggcggtgcttcaatcagggaaccgatgcttttcaaatcttcgcgcttccatgtatgtccctcgaacagaacctcgccggatgtttgctgcagcatgccggtcaatattttgagagtcgtcgattttcccgcgccgttcggaccgagcaggccgtatatactgttgcgcttaaccgatagagacacatcagccactgcctgttgtctgccgaatgatttttgcagctgtctcgtttctatgatgttgctcatatgattacccctctgctttgttatttgatatgtaagactttacagcgcagttatcaaaatttaatcaagaaatcaaaaaaagcatccttcacgcggaagaatgctttttttcatgaggctgagcgtacgatcagctttcttttttgttttttcacagggctgagggctcgttccagccacgccatcagcaggtctgcggccaccgccatcagcgcggtcggaatggcgcccgccagaataatggcggttccgtttgtcgcgttcgagcctctgacgatcatatccccgagaccgcctgcgccgacgaaagtgccgatcgctgtgatgccgatggcaatgacgagcgccgttcggagacccgccataatgacggaaagcgcaagcggcagctccaccatacgaaggatttggtatttcgtcatgcccatcgcttttcccgactcgagataagcgtgctcgatattgataatgcccgtgtgcgtatttctgagaatcggcagcagtgaatacaaaaacaaagccgtgatgaccgtattggcgccgagccccatgacaagcatcaggacggcgagcatcgcaagcgccggaacggtttgaatcacgttcgccacagcaaacacccagccggcgagacgcccgtgcctggctgtcacaattccggccggaatggcgaaaacggcggcgaaaacgacgccgtacgccgacatgagaaagtgccgccagcactcatacagaacatagctgccgttttgagcgtaatacgtaaacaactctttcatcgtgtccatccgcacatctcctttccgttattcaaagtaatgatgtttttctaaatattccttggccacgacggacggctcttttaatcggccgtcaacttcgtaattcattttctgcatcatctttgtatcaatcgcgccgatcattttattgatcacgccctccagttcgggatgctcttttaatacatgatccggaacgacgggtgaacagtcatacggaggaaagaaccgcttatcatccttcagcgttttcagtccgtaagcgatgattcttccgtcggtggaataagcgagcgcgatatccatctttctgcttttcagcgcgtcgtatacgaggccgatctgcattggatacgtgccttcaaatgacattccgtatgttttcataaaatcctgatatccgttgcctctcagcttcatccaatagttatctacgccgaatttcagatgggatgcttcttttttgacatcggataccgtttctaaatggtacttgctggcaagctgtccggaaacggtaaagacgtatgtattatcaaagccgtaagaatcaaaccatttcatgtcatatctgttttgaaattcacgctgaacgagccgcagcgctttgtccgggtctttttccggctccatgcgaagcgtcccggtcagcgcgtctcctgtatagcgcgtcgcggcgatatcaatatcaccgttgatcaaggattgctgctgtacggcgttggagccgagatttttaataacggatgttttcaacccgctgtgatgttcgatcatctgtccgagcatgcttgcgatgatttccgattcggtcatgctttgcgcgccgattttaatggtgtcctccgatgcggcgctcaatcccgggagcgagcatccgccaaggagcagcatgccgagacaggcgattgcgagcagccgttttttgcatctattccccatgtgagacctcctccttataaagcgtcctttatgcttttcagcccgtcaggcgtgactttccgttctgtcacccccagcatgtaatcgacggcggccgccagcatcgtgaccggaacggcgcctgcgataatatactccggctgataaaggttcaagccgataaaaatgtaatctcccagcccgcctccgccgataaaggaggcgagcgtcgcccagccgattaaataaatcgaagacgtcctgatgcccgccatgatgaccggggcggcaagcgggagctctacaagcctgatctgctcccatgccgtcatgccgattccttttcccgattccagaaggtgccgattgacgccgagaatccccgtatacgtgtttctgagaatcggcagcatggaatagaaaaacagcgccgcaacggccgggacctttcctacgcctaaaagcggaataaaaaacgcaagaatggcaaggctcggcaaggtttgaatgatgttgacgatgccgatgacggcgccggctcctcttttcatcctcgtcagcaggacgccgagcggaacggcggcgagaatgcccgccatgacggcgattaatgagatgtacagatgctcccatgttttataaagcatctctcctccatttgcctgtaaaaattgtacggtctgattcatatcaattgaagcctcctcatgacatcaccgcgagctgattctcttctccccagatggagtcatagacgatgtcaacgaggcttgcccttgtcacgattcccgttagccggccgtcctcatcaaggaccggcacaaatttcacgcctctttttaaaattttatggacggcgtcgcgaagcagagtgccgcttctgaccgtgtacagatcccgttcaagcacttccgcgacggttaccgcttgtcttcgtttgcggtcaatcatctccacatcgacataaccttggagaacgttcttttcatcaatgacgagcagcgaatccacccgctcggcacgcatcagctgaatggcggctgacagtgttttctcaggtgttaccgtcacgggatcgggattcatgatctgctccacccgttcaatatcagggctggatgattgaatcagccgttccttgccgataaactcctcaacaaattcattcgccggaaatctgagaatctcatcaggcgttccggcctggacgatttctcccgctttcagaatgacgattctgtctgcaagcttgatggcttcgtccatatcatgggtaacaaatacgatggttttatgtaaggttttttgcagttttttaaattcttcctgaagggaatctctcgtaatcgggtcaagcgccccgaacggttcatccattaagataagcggcggctctgcggcaagtgcccgtaatacacctattcgctgctgctgtcctccgctcagttcatgagggtaacggtctaaatattcaggccccatatcaacgagctttaaaagctcccgcgcccgttccttccgtttttcggcagaatgctttaaaagcttcggaacgagcgtaatgttctgctgaatggtcatatgcggaaacagcccgatctgctggatgacatagccgatgcttcttctgagttccaccgggtcttgttccataatgtttcggccctctatcaggattctgccttctgtcggttcaattaagcggttgatcattttcatcgtcgtcgttttgccgcagccgctcggtccgataaaacaaataaattcgcctttgtcgatattcaggttgatgctgttgacggcttttttcccgcctttatacgttttcgagacattttctaatgtcagcaaacactcacacctccgatattaaatttgttcaaatcgttaaattcaaatttaacttttcagacaattgaacgtttcccattataaattaaactttgtaaattaaaaagtttacaatttgtccatattatatataaaggttgtgtaagcactgatttacccgtattgaccggcaaagttcttcttattgctccgaattactgccaaattctctcggaagagcatttccgccggtttaaaaatgtggtatattgacatcggaattgctgactgaaaggattgaaactgttggagaaagatccgttacacgtaatcgaacaagctgaagatcatttgatagaacgaatcgctgaaaatatgcatacattcggaatgcccgcgacggtggggcgcattttaggcattatttatatgaaccgcaagccgatgaccttaactgaattatcagaagcgaccggcatgagcaaaacgagaatgagccaggcggtccgtgaaatgcttgacgtcaatctggcggaaaaagtgtttgaaaaaggcgtccgcaaagatttatacgacgtcgagcaggattactaccaaacctttattacgctgtttacggccacatggagcaaggtcgtcagcaaaaataaaatgatgcataaaaaactgaaccgcgaactgacggccgtccttgaaaacggcgtgccggaagaagctgaggaaaaaatcaacgaactgctgaaagaattaaaggattggcttgattactacaactggatcagccgtctgatcgagttttttgaaagcgaagaaatattcaagcatgttccgaagccataagaaaaaaaacgccctgacccgcaaggcgtttttttcatgccgcattcggcgctttggttcgttttttctttctcaccggactcagcgcccgctccagccatgccatcacaagatctgcgataacggccatcagcgctgtcggaatggcgccggctaaaataatcgctgttccgttcgtggcgtttgagcccctgacaatgatgtcaccgagtccgcccgcgccgacaaacgttccgattgccgtaatgccgatcgcgatgacaagggccgtccgcagccccgccatgatgacggaaagcgcaagcggcagttccaccatgcggagcacctgaaatttggtcatgcccatcgcttttcccgattcaagataagcgtgttcaatgctggcgattcctgtgtacgtattccggatgatcggaagaagcgaatataaaaacagcgacaaaatcaccgtattggcgccgagccccatgacgagcatcagcaccgcaagcatcgcaagcgccggcacggtctgaatcacgtttgtcaccgcgaatacccagccgcttaatgttctgtacctggcaatgaagatgccgagcgggacacctacgatcgccgcaaataaaacgccgtataccgacatgagaaaatggcggtaaaactcctgaagcacataggccccgttttgagaataataagtgccgagctgctgcagcacttccatttgccccacctcatttcttattcaaaataatgatgtttctccaaaaattctttagcgacgacggacggttctttcagcttgccgtccacctcgtaattcaattcctgcatcgtttccgtatcgattttgccgatcagtttattcacaatgcccttcagttcaggatgctgcttcagcacgctgtcgggaatgaccggcgaacagtcatacggcgggaaaaactgcttgtcgtcttttaaaattttcagatcgtacgctttaatccgtccgtccgttgaataagcgaggacggcgtccattttcccgtttttcacggcatcgtatacaagtccgatctgcatcggataggttgtgccgaattcaaaaccgtacgtgtcggtgaagcccttatagccgtcgccttttcttttcagccacgcattgtctacaccgagcttaaattgatccgcatgcttcttaatatcggatactttgtctaaatgatctttttccgcaagctctttcgtgacggtaaaagcgtatgtgttctcaaatccgtaagaatcaaaccatttgtaatggaagcgtttctcaaattccttctggacgatagataatgcttttttcgggtctttttccgcttccatgccgagggtgctcgttaaatccgttcccgagtagcgcgtcgcggcgatatcgatttcaccgccgagcatcgcctgctgctggacatagttcgatccgaggtttttaattaatgccgtattcaagtctgtattgtgctcaatcatctgtgcgagcatattggcgataatttctgattccgtcatgctttgcgccccgattttaatcgtatcatcggaagccccgctcaggccgggaagggaacagccgcccagaagcagagcagctgacagcgccagtgcgcacatccatctcttttggtttcttttcaaaacagccaactccttatgatacttccttcagtcctttcagccctttcggcgtcaccttccgttccgtcgccgccagcagataatcaatgataatggctaaaatggtgacgggcacggcgccgccgataatatattcaggctgatagagattcaggccgataaaaatatagtctccgagcccgccgcccccgataaaggaagcaagcgtcgcccagccgatcagataaatggtggatgtgcggatgcccgccataatcaccggaaccgcaagcggcagttccacaagcctgatctgctcccagaccgtcatcccgatgccttttcccgattccagcagatttttgtttacgccttgaatgccggtatacgtgtttcggagaatcggcagcaccgaatagaaaaacagcgcgacgatcgcgggcacctttcccacgcctaacagcgggataaaaaacgccagtatcgcgagactcggcaaggtctgcacaatgttgacggcgccgatgacggcgcctgcgccctttttcattctcgtcagcgccactccgagcggaacggcgacgacaatgcctaatatgacggcgatgatcgaaatgtataaatgctcccacgttttatataacagttctccgccgttcgtctgcaaaaacttgatcatttcattcattgtaagcgttcctccccttgtcagcctgtcaccagctggtcttcctcgccccagattgaatcgtaaacgatgtcgacaaggctcgcccgcgtgacaattccgactaaatgcctttgttcatcaacgacgggtacatatttcattccgcgctttaaaattttgcgtacggtatcacgcagcagtgtaccctgctcgaccgtatacagatcagagcggagcacgtcgccgacgaggctcgcttttttccggttctgatcaatgatctcgacatcgacatacccttgcagcacattcaggtcatcaacgacaagcagggaatcgacacggtgctcccgcatcacttggatcgcctgcgaaagtgttttgtccgccgtaacggtgacaggctttttgttcatcatctgctcgacgcgctcaatgtccggtcttgattgcaataaccgttctttgccgataaattcttcgacaaactcattagccggattccggagaatgtcatcaggagtgccggcctgaacgatctctcccgcttttaaaatgacgatccggtcagccagcttaatcgcttcatccatatcgtgggttacaaacacaatcgttttattcaatgttctttgcagttttttgaattcttcctgaagggaatcccgtgtaatcgggtcaagcgctccgaacggttcatccataagaataagaggcggttccgccgcaagggcgcgcagcacgccgattctctgctgctgtcccccgctcagctcgtgaggatagcggtctaaatattccgggcccatatcgacgagcttcaaaagctcccgcgcccgttccttccgcttttgttccggccatttcagcagtttcggcacgagagaaatgttctgctgaatggtcatatgagggaaaagtccgatctgctgaatgacgtagccgattttccgtctcagctccaccgggtcctgctccataatgttttcgccatcgataaaaatctttccggatgacggctcaatcagtctgttaatcattttcatcgtcgtcgtttttccgcagccgctcggcccgataaaacaaataaactcgcctttttcgatatttaaatcaatgctgttgacagctttttttccgcctttatagactttcgatacattttctaatctcagcaatccgtgcacctccgaagggttccgttatttttctgaaaagtataatctttattataagatgaaatttgtaaaataaaaagtttacaatgtgttgaaattatatacaatatacgtattttttcatgttatcccgctgacaatgcggatgttcttacaatcgctcccgatagctcgcatatcctgccgcatcatctttttcatcaactgtaaaaaatatgatatattgtcagcatgaaaagccagtgaagggatgatcagccgtggaaaaaaacgctcttgatatcatcgggcatgctgaagagcatctcattgagagaatcgccgagaatatgcatacattcggaatgccggccacacttggtcgtgtgctcggtattatttatatgaaccgcaagccgatgacgttaaatgagctgtcagaggcaaccgggatgagcaaaacgaggatgagccaggtggtccgtgaaatgactgatgccaatctggcggaaaaagtgtttgaaaaaggcgttcgcaaagacctttacgacgtggagcgtgattattaccagacgtttatctccctgtttacggcaaattggacaaaggcggtcagcaaaaacaaaatgctctataaaaagctgaaccgcgagctgactgagcttctggaatcggaaaatctcagtcccgatattgaagaaaaagcccgtcagcttttggatgaactgacggattggctccattattatgactggctgagccgtttgatagaattttttgagagtgaagaagtgtttcagcatgtgccgaaaatagaaaaaagcagcccccgaagataaccgggcgctgcttttttaagtcaggaaaccaatatcgggaacatgcctttcagaccggcgccgatcatgccgatcgccaccaccgccaaaatcagccccatcagtcgggtaatgacgttcatttcggttttcccgagcttattgctgatgaaagaagaatagtgaaagaagatgaacgtcatcgcgatgacggccgcaatgccgataagcacgctgatgtaatggatgatgccgccatggccggccgacagactcatcaccgtcgcgatcgtaccgggtccggcgataatcggaatcgacaaaggcgtcacggatatatcggctttctccttgctctcccctttctcttcatgatggagagactgtacatgagatttcttcgcgttcagaagattataagcgatgccgaaaataaaaatgccgcccgcgatacgcaaggcatgaatgttaatgtcgaacagtttaaagatcagatggccgaaaattaaaaaagcagccaagatgataaacgacagcacggaagccttgcgtgcgatcgctgtccgttctttctccgggtatccttccgtcagtgaaagaaaaatcggcacgtttccgatgggattggagactgcaaacagtgaaatgaagacatgaatgatgaatgaaaacatgcgtacctccttatgacttgccgttattgagttatgttttgttctccgctgtttcttatgcatgatttttaccccggggtctgctttttataacctcagccggacgatccggaaaacagaaaaaaaccgtccttgtaaggacggtttttttctgtttgctatctccataagccttttccgaatttcaacagccgataaagcattttcaatttttttagcatgcgttaatttcctttttcactctgaatcaatgcgccgagagacatgatatctatcagctccaataaaattctaccataatgggtactttttctctattatcaattcatagagaaggtgatttatatatctttagaaaactccgttacatccgtcctattttcttttataatgtaaatattgaacaaaatccctatattacttgtaaaaggagttttagaatgtattgttctcaatgcggccatcatactgatggcggaaaattttgtgaaaaatgcggtgcgccccagcccgggcagggaggcgcaggccaaacacagggtcaggccgctcaggccggcgccgcggctaagcaggcttcaaagcaatttgccttattcgtgcttgatgtgttaaagagaccgtatcaaacatgtaaaacgacaggcggcgaacagcttgtcagcagcatcatcaacatggtgcttttctgcctggtgacgccgattatgttttatattctcttatcagacggctttcgtgacgtcagttttaccgcggttgtgatcaaaccggcgcttacctttgcattatgcgttttctgcctgtatctcttgatttttatcgctttgaaggccggcggcgcgcaggtgtcatttaaagattcgctgtccagattcggagcatttttgattccgtttacagctattttgcttcttgccctcatttttatgctgcttcatacaaccgtttgctttaccattctggctgtcggtcttttaggagcggcgtttgccgtgcctccgctcatgctggcgagctatcagcatcagctcactgctaaggcggatatcatttattctgttatcgtcatctatttgatcatttgcgtaacgtttcaattcacgatcaagcattatatgaaagaactcatgaattatttcttcttttaaaaacggaaacccccgccgcctgattggcgcgggggtttttttattgaatggatgttaaataaattcttccgtctttgacaacgccgccatacgtccaattgtatgttctgagcttcggactgccgccggctttcgtaatataaaactcctcgtacgtatgaatcgtcagatgagagcctttctgtgaaaagcttttgacattcactttattaaatacttcagtcgtcccctcgctgtacagttttttgaccagtttctgctgatcagcatacaaagggcttccctcttctaaattgcccgccatgatggcaaaattgttaaggctgacggcgcttgattgatttgtcaggtaatcagtcataaacgatgtgacttgctcgtttgtcacgctgcctgaagctgtatttcctttggaagatgcccatgcggatgtataggttttcggctggtcgttttttattttttttacatttgtcccagaagaatctgaggctggatcagctttttcaaaaacccattttttatgttttgtatcatatgagagtacataatgaaagctcggctcagcctcttccatatcaggcttcgtattcccgtcgaaataagcagactcatgaagctctttacccgtaacagttacttgccagcggccgttctcttgagaaatcgcaaatgaatccagatcaaagcttgtctctttatactgatctttcaaaaaggtgccggaactcttcatgccggataccacttctttcgtctgctctttccaggcggaaccagcctcggtcatctgatcggtatttccgtctgccatcgcttttgtatactgcttcgttgttttgacaatcgtgtccatgattgtttgttgtgtatcttgatccgggataagcgttaattccatatcagtaccgttgatcggaacatcggcagttttcatttttccccaaggaaaatcagcctccacggcggctgtcatggaaccgtcagttaagagcggaccgtatgtaacggatgtaaacggatctttatggacggacttgccgtttatcagcagatcgcctttcgcgcttttgaagctgtctgccggagtgaacgtcacatcctcggcgtctaacggcagatcaaaatcaacattccggctgccggccgcctctgcctcttgctttttgacaacgtcaaccgtgtcatttttaagcttggcttccgccgtgtagacaccgggtgcatacgggccgaagatttgggtttcatcggcttttttgaccgtccctgttttctcgctgttgatataaagatcggcgcctttataattgctggtgacgcggaaataaaccggatcgactttcagttcgtaatggtcaaacaaaagaagggttttaccctcttttttgacgtataccgcatctttttctgatgaattgccgcgaagcgtttccagcagttcatcgtgtttctttgcgtatgcaaggagcggtttgacattggtctcattcagcttcagttttttgtctgaaggagtgagcagggctgcgagctttttcgtgtccccgtcatgaaccgcctgttcgaattgatccgtgagccttttttcagatgtcagccaggctccggttttatatgcggcaatcaataagatcagcgctgcggctatgccgccccatatgaagagcgtttttttagggatcggctttctcatttgtgaagcaggttcagccgctcttacagccgcctgccgttcaagccggcttcctttcccgatcggttttccgcattctttacagaaatgcgcctcttcgttgttctgtcggccgcaatacttacaaaaaaacatgactttcctcctattcaatctacaaaacttgtataacttttcctatgtttcatattttataataaagtagaatgattttggagttattttgaaaaatagctgtcgatcataacggaggaggagaaacggacatgcaaaaactgagcatccgaaaagccgcggatccggatgaagcgctgtatgaactattgctgctggccgatccgtcgaaagagattgtcgatgattatcttgtaagaggagaatgctatacggcttggacgtcagacgagcttgcaggggtttacgttttattgcaaacaaggcctaaaacgatagaaatcgtaaacatcgcggtaaaagaatcgctgcagaacaggggattcggaaaacagctggtgcaagatgccattgaaaaagcgagacaatcgggagctgacacgattgaaatcggcaccggaaattccagtattcatcagctgtcactctatcaaaaatgcggattccgcattcaggctgtcgaccatgatttttttatcagacattatgatgaagacatttttgaaaacggcattcaatgcctggatatgatacggctttatttggatttatgataaaaagggcgccggctgataccggcgcaccttcgtttaccattcagacggattgatccgcttgtttctctgaatttctttgactcccttgtctgactgaaaaaacagcaaaaacgatcgtaagggtcagtccgaccgccgcaaaaatataatccgcattcatcaacagcagaagccctgtgtagacagcggcagacagcggttcacccattttgacaatggaaaaaatcagtgcaaaaacccttccgaaatatgcggccggaaccgtcttttggaaatacagcaccgtttgcacatcaatatacgagatgatgatgccaagcaccaggaaaatgatgcactcaaacccgtgaagcggaaaaaacagcaccaaaatgagcagtcccgctgccgttaacgtccgcggatacagccggttcaagcgttttgtattccatttgaaaaatacggccagattgcccaaaagcatccccgcctgaaacattgaatacatgacggcaaaccatacagaatagttctgctgaaaacgttccacagcaagaatcggccccattactgaaataagaccggcaatgacgagatttacgacgaaaaagtatccgaccgatgtcagccatgccgcatttcctttcagcattctgtagccggcttttacatcttcagccccgttgcttttttcattgggctgttctgaaatacgaatgaacgcgataaatgccgcggagataaaaaaagcagttccgtttatggcaaacagcagcccgaacggaatagccgcaatcatgattccgctgatcagttttccgacgatgagtccgatcaagtcactcgtattgatcagagatgtcgcctgatcaagatgctgtttgcggacgagcagcggaatgatcgcgactttcgccggcgcaaacagcatcgattgcagagatagacaaaaggcgcacacccctgctatccacacggttaataaatcgttcgcgctgagcaccgccaagaggatcatgatgacggcccggcccgtattgcacaaatacaagatcgacttttttcggaataaatcaatcagcggtcccgccagcacgccaaatgtcaacggcacgagttcgataaaagaaataacgccgacaagaattttactgccggtcaattccagcactaacagcggcagtgcaataagccagataccgtccgccgctgaagaaaacacctgcgcacaccaaagctttgcatagttcggtgttcgatatgtcatatcaggcccttttttgatcctcggcatcagaaacaccgccgaaccattccagcgttctccatgattcccgtctttccgtataatcctcttccatcacctcaaatacaatgccggtatcttgattccgataaagctcctgcaaagtatcggcagcccgtctcagcagctcctcagcgatcgtcccttcactcggatggcggccctcaaaacagcggacgccgccatgcgggaacgcaagctggcgaaatgagctgaagtgataatgtttaatgctctcttttatcgagagaaactgaaagaaatccgggtatctcagctggtcatttctgaacataagcgcggaagacaagtgagtctgataggtaatcgcccaatggcacagatcccacgtaataccgacatgcttcagatccagctgaaccagctctgtaaaatcctcaggataaatgaaaatcggatcaaaatcctctcccagattcccgatgatcggaaggttttccacaccgatccaaatgtccgtccctttcagctgctcatcaaactctgcgaaaaactcaatgatttttttacggtttccttccaggtcatacacttgaaattcctcaaccgtcataaattgattcgcatgaacggttatgcctttggcgccgtatttcacagcgagctccgcaaagtgataaagctgttttttgatgtgatcttcatgcacataatcggcatgatctgtcgggaaatgcagcgtcaataatgaaggatcaagctgttttgcatattccagcgtctgattgaatgttttgagataatccgcttcactaaaggagcggccgtcaaaaatattcgcttccagaccgtatcccgcttccacccatttctcatcgatttgcttcggatcaagtccgaaaaacggaatttgagcaatcataggacagtcaccatgttcctctcacaagcataaacgcttccgcagcggaaaaacccgattttgctccccatacacgggcattatgttcgattgcctgcaaagagcggggatgagggaagtctctgagctcggagccgtaacacgccatcgatttcaattttgtttcaagctcgtcttcaatattaacgaagaaattggcatgaaactgatccttctgacagtaattccattccgtcgaagacaatgtttcataggcaaaaacccgttttaccgtatggccgggaagcggacgggttgcggtcatgaccgctctgaatacgacggagtggtcaatattaatgtcaccgccgtactgggtatacacaatgtcaggctgaaaacgattgatttgtttctccgcttccttcacgacatccagcaaatccattgaatccattctgttatcaggaaggttcagcctgacaaaatcatggatgcccaaagtgctgagcgcttgttccgtttcttgagcagaatgctgcataacagactcttcaggcttctcataatccgtttttcttgatgacttgccttccgccataatgactgccgacacgctgtcaccttggcggacatgtttggcgagcgtgccgccgacgccgataatttcatcgtcgggatgcgctgcaaataccattactttcatcatattgccctcctttaactaacatttcagctgtatccgctccgcagttcatcagcatatcaagcatggagaggtgagggatatgctccccgaataattgaggatagtcaaaatgccggatctgctgatactcaatgacaattccgtttctttcaaaatcgctttctattaaatagtcggaaccctgactgcctgaataataacgatccgcccccagctcctgacaaagcgctaaaacaaaatcgctttttttctccttccggcattcaagctcagagacataacagagcggcgtttcgattcggagctcttttcggaaaaattcaatgatgtgcatattcaaatcatggagatattcccactccctctgatagacatcttgaaaaaaatgctggtaccgctcaaaatagggagctttcgcatagttcatcttaatcgccatccaatgttttttccgccaatcctgtgtctggtcgattttcatatgccgaagctctatgtctttatattgtttcatctgcaaaggcaccgtcagccatctggggccctgcggcgttttgattctgttgcggttcagaaacccttttttctcaaattgagccgtgtcatgaatggcaaacagatccgacttatacattttttcaaaaaaaccgtaccacggcagataactggattgatggccgcttattgttttcattccggtttcgtaaaaagtcggcattgtttttcttcagctccccaatatcgtttcggtcttgcgatttctttactgtgtgaatagccaaaatcagcccattgaagcttgcggcaaatggcgaattgcaaagcgtcacgcatcaacaagtaagaggcctgcgctttttttcccgccaggctgtttacattctgccaataatagaaatgagagcggtcatagagaaaaatactgctgctgatcagcgtctcatcctgatatgctccgacccaaaacatccggtccccaaacgtgtcaagcagtttttggaaaaatccttggctcagcacataagcagcgccgattgccgccgtatgctccttgtagaggtcgtaaaatgattcaagttcttgtcgcccgatcagcctggtgacaatattctctttttcagcgtatctgactgccgtccgggcttttccggaaatgcccgtccaaagttcgtcaaacgtgtccggaagcgtaagaatccgtgtcgccttttccgtccacccttccccgatttcttctgtaaaagaagtctgaccgtacggcagcagcatccgggatatgttccggccgaatatggcctcgatttcactttgaagccattcaaatgagatggggcgatctgaaataacgccgccgtatccgatcatattgccggataatacgcccttctgttcaaaaagcggaagatagatgacctgtcctccgtccgttgtcagtctgacagggtgaaatgacgtgccgggaagctcttccatgagaattccccaatcatagctttgaaacaaccccgcctgatacatgtcagcggcccgatcccatgcctggcggctcgtgcatactgctgttttttgcattgttatcaccactattcagtcttattcttttgctcacaatatgataaaacggattcggctatatatctgacttgctccttttgaagaggaggtttaaacggcagagaaagaactcttttccaaagcggatcttccccttcttccgccgcatatgtttcataaatcggaatacgtccgaggggaagatagttccagcatgtttggatgcctctttcagctaaataaacggaacacccgtaccgctcttcatcccgggggaatacaatcgttaaataattcagatgttctccttcttggggctggatcatctttatgccgtacgtctcttccgcctttataaagatttctcccgccgcttgtaagtttcggagcgaagctgttacaagctgatccataagtgaaagctgatcttcaataatggcttcccttgccggatgcatgcgaagcaccggtacaacagccggtttatccggcagagcttcgagcttagtggctttcatggaaggcatgatgcccgctttcctataaatatatgaaacgggatgatgccgtttccgtttcataacagcctgtattctttgatttctgatataaattcgatagtcagctgccacttggctgcgctgttccatcgggaaatttgctttttgccgaagccattctttcggcgcgattaacgcgccgcctccgatactcgcaagcggttttgacgggccgaagcttaaaacaccgaaatcgcccagaccgccggcatatgtatccgcttgttttgtaaacatggcttgagcggcatcatcaatgacaaaaataccgtgttccttcgcccagtcaatgatggcggtattttctctccggccgtatacgtgcgtgaggataaccgcacacgtctgccgcgtcgctctttttttgacatcctcaaacgataaagaaagatgctcatccagctgcgcaaaaacaggcgttgcaccggattgcaatacggcatcaatgacattcgggcagctgaaggatgagaaaatcacttctttccccggcccggctcccgaataagttaaggcgagcaccagtgccgcactgccgctggaggtcagcacaaccccttttccgtaccgtttttccagtttttcagtcagtccgctttgtccgccagtaagcaagtgcttcaccgcgcgcagacggtccctgacggaaagctgtccgggataaacgggatatttgactacttccgggttttcaggaaagtgaaagtttgtgcttttgtctttcatcttttatgatctccaggccttcattcagacttacttttggatcgtaaccgagtaaacgtttcgccttctcgattgacggcgcccgtttaaaaatctcgatgtcttttcccctcacgccgtcttcgcccagctttttaaacagatagttatccttctctctgccagagagcacattgactttttcagccagttcttttatcgtgatcggctggtcgttcccgatattaaagtcttcaaagacggctccttcatgaatgagcgcgagataagttccggtgacgatatcactgatgtagctgaagcagcgtatttgtccgccgtccccgtaaagaggcagctcagagccattctcggccaggctgaaaaacttgttgatgacaaaatcctcgcgctgtttcggcccgtatacattaaagtaccggacgacccgaatatgaagcttgtcggaagcctgttctctcaaatattcctctgattgcagtttggcttttccgtaagccgatttcggaagctttctgcttgtctcggtataaggaaaatcaggtgaatctccgaatacttctgagctcgatgagaaaagaagtgttctgattcccaattcaccgcatacctcggtgacatttttcgttccttcaaaattaacccgtatgacgtcttcttcattgcttcggcagctgtctacaccgaccattgccgccaaatggacaaccgcatccgctccccgcagtgattcgcggagggacgtccgatcaaggatatccgtttggcggtattcagtgtcaaaagccggctccttttggtctgcaataatggtgtgataacctttagcctgtaataatgccgccaattcgcttccgataaaaccggctcctccgataatcgcaatatgtttcatgatcctacctcctggctgatagtcaaaacttcttttatagacttgacaatatagctgcaatcctcatctgataactggctgtaaagaggcagtgacacgatctcccggaaaacacgttcagtaaccggcagctcggccggaaaatgtttttgatagtaaggatgcatatgcacgggaataaagtgcacgctcagcccgatctgtttttctttcattttctcaataaacagatctctgtccatgccgccgttctctcggatccgcaaaataaataaatgccatgagtgcgttatgccgttcggaatgtcagaaagcggaagcgctgctttgtcagattggcccgacagttcacgtacataaaattgagcgatctgtgcccgtttttcttgaatttcgtttgcgcgcttcaattgaaccagaccgagcgcggcctgaatatccgtcatattatatttaaagcccggcagtaacacgtcgtatctccagctgcctttttcaccgtaccggttccaggcattttttgtgatgccgtgccagccgtacagcctcgctctttctgcggcctgttcgtctttcatgacgagggctccgccttcccccgttgtaatatttttggtggcataaaagctgaagcacacggcatcgccgtgagtgccgatcatgcttccgttatattttgtaccgagcgcatgagcggcgtcttcaatcagatacaatccgttttctttacaaatggactgcaagttttccagatcagccggatagccggcaaaatgaaccgcaattaccgcttttgtgcgcggcgttattttcttcctgacatcttcaggatcggcacatagacttttctcgcatatatccgcaaacacaggaacggctccggcgtgcaggatgacattgacgctggaacagaacgtgaagctcggcacgatgacttcatcgccttctcccacaccgagcgccaataaagccatgtgtaatgcagcggttcctgaattacagctgatgacgtgttcggctccaatacattctcccagctttttttcaaaatcgattaccttcgggcctttcgaaatccagcccgactgaatcgtttcggttacgcttgcgatttcttcgtttgtcatatcaggtctgtgaaaagagataaatcgattactaatgaccgttccctcctataaagtgacaactctgcaattgtcggctgatttttccctgcatacatttcttgtgtcaaagataatcggtgaggcatccttcaaaatactgtagtcgattacatcgtgatctgtatgaatgatgatgacgtcgtactgattgatttgttcttttgtgaaagggacagattgtttgcggcttccgtcattcaagcggatctcgctgataaacggatcatgataatcaatcgcgcatcccttgtccatcaattcttccattatcgtaaacactgaggattcacgcgggtcatttgtattttttttataagcggcccctattattaagatgctgcatttgtctttgcccgccagtttcaaagcatagtcagagacagaaatcggcatgttagaattgatttcgtccgccagatcaattaattttgtctgcagccctttttcattcgcgatccatttgaagtaaaaaggatcaatcgggatacaatggcctccgactccggggccagggataaatttttgaaagccgaacggcttcgtgtccgccgcgcagatgacttcccatatatcaatatcaagttcacggcaattaagcgccatttcattgataagagctatattgacataacgataagtattctctaggagtttagctgtttcagctacttcgggtgaggtgaccgggtgaatgcttgtaacaatggtgttgtaaaacgctgaggcaagttctgtgcaagtctgtgtggttccgccgactactttaggaatatctgaaacttcatattgcctgttgcccggatcgattctttccggagaataagccgtaaaaaagtctgttcctattttcatgccgcggcttgatgccattctgtcggcaatcttttttttcgttgttccgggataggtggtgctttctaaaattaaaagctgatgctgccttccataagcgatcatgctgtcaactgcactgtcgatgtaggttaaatcggggatcttgtcttttttgttcaggggtgtcggcacacatatcacaatgatgtcgcatttttggatgagcgacatgtcggcactgatttgaaagcgttttgtttgtaaagccgagttcagtctgccgtcctctatatcttgaatatggctgcttccggcggctaacaaggaaaccttttcactgtttttgtcaaatccgatcacattgtatcctttatcgacacattccagcgcaagaggaaatcccacatatcccatgcctaacacgcctactatcgcctgcttcgtttcaatcagatgtaacagccgtttttgaccaaggttgctggcttcttttgtgacagtattcatttttcgccccctaatagatagaaaagagtattgttttttacaatttaaaacaaatatcgatcgatatcgcaattataacaaaagttaaaatttgataaatgagttttacatccttttgtgaattaggtattatctatttatttttcttttatttgtaaaataaaatcctgttaaatggtatatatctggtaacgagtgagaaaatctcccttaattgatagaatatacagaaaataatataaaaaaacaggccgaagcctgttttttattccttcattgcctcagttactgccgcggaaacgagtgctccagctttctctagccgttctttgctgatgtgtttcatattatcattttcggtgtggtaccagggccccggctcctgtgtatcggggctgagccaaatccagttagccgacggaatccccgcttcataaaaagagacatggtctgagtaaccgagctgaatcaggtttggcttgaccaaccgggatttttcagcggctttttcagcataccggacactcgggtttttcctgccgtcaggagtcgtgacacacatttgactcgcttcttcccagtcagtcgcaatcatatcggcattaaaattggcccggctgtgctttctttcattgttcgtgagtgtactgacgtaataagatgaacccgcagaccataattcttctgcaccgaacaggataaagcggatctctttgtctttcggtatatgtttgagttgcttgctgatttccagaacggcagatgtgcctgaggcgttatcatccgctccgggcgcgccttttacgctgtcataatgcgctgtgacataaataatatcagcatcagaagagttggcctgtgccgctttgcgcgttcctataatattttgtgaggtgcggtttttatagtttttaaattgaatgactgccttcttttcctgaagcaatgcttcaccgtcttcttttttcatacccgccgccggtatcgtgattcctttatcggtatgcggacggacggcgagcggttttgttgtctgattataaataatgactgctttggctcccgcttgttcggcatgtttgatcttttgagaaacagggatctttccttcgcgtatcactgcaatctttccttcggctcctgttacgtcattgcgtgatccgcagccgccgtcaaaaatcccgccttctattttgagctctttttcaacagcggattgatcagcggagcggagcgggaattcatgatctcccgctgtgactgaacctgaaaagtactttttcaatggaaatgactgtactttgacactggcgccctgagcccgcagacgattcgatatgtattcagccgcttccttttctttcgcagttccggtttcccgcggaccgatggtttcactcagatcatgcatagtgtccaatgcctcatcagcatcaaaaaccggcgcggtcacagttgaataagcatgagtttcggacagcggcccggcagacgcgccccatatgacgcttgctgccaccgcggctgacataaatgaaaatttcatcataatccctcctcttattaacacctcttccctttcgattgaagaacactgattcctttaaaaaggggaaaaatgaatattattgaccaaatgaagatgatgaaaaaggagggaaaagcccgggaccataaaaaaacgccgggagatattctcccggcgtccattacattacttatttaagttatagaaagagttgataccgtgatattgagcagtttcagccaactgatcttcgatgcgaagaagctggttgtatttcgcaacacggtccgtacgggacggagcacctgttttgatttgtcctgcattagttgccacagcgatgtcagcgattgtgctgtcttcagtttcaccggaacggtgagagataacggcagtgtagcctgcgcgtttcgccatttcgatcgcatcgaatgtttcagtcaatgtaccgatttggtttactttgatcaggatagagttgcctacgccgtttttgataccttcagcaagctttttcgtgtttgtaacgaaaaggtcgtcaccgacaagctgaacttttttgccaagacgctctgtaagaagtttgtggccttcccagtcgttctcgtcaagtccgtcttcgatagagatgattgggtatttagaaaccatttcttcgtaccagtcaaccatttcagcagatgttttcacaacgccttcgccagacagatggtatttaccgtcttctttgttgtagaactcagaagatgcagcatccatagcaagcttcacttcttcgccaggtttgaagccggctttttcgattgcttcaacgattgtttgaagcgcttcttcgttagaaccaaggttcggagcgaatccgccttcgtcacctacagctgtgttcattcctttagcagaaagaactgatttcaggctgtggaagatttgagcgcccatgcgaagcgcttcacggaagttaggcgcgcctacaggcataatcatgaattcttgaatgtctacgttgttgtcagcatgctctccgccgtttacgatgttcatcatcggtacaggaagcgtttttgagttgaatcctccaaggtattggtaaagaggaatctgtaagaaatcagcagctgcgcgcgcacaagccatagatacgccaaggattgcgttcgcaccgagtttgcctttgttttcagtaccgtcaagctcgattaaaagctgatcgattgcgttttgttcagttacgtcaaagccgagaagctctggagcaatgatttcgtttacgttgttaacagcagttaacacgccttttccaaggtaacggtctttgtcgccgtcacgaagctcaaccgcttcgtattcacctgtagaagctccgcttggcactaatgcgcggccgaaagctcctgtttctgtatatacttcaacttcaactgtcgggttgccgcgggagtcaaggacttcgcgtgcataaacatcaacaatgtatggcatgagtttgtctctccttttgatttacgcttatttttgaattaaagatgttccggtcatttctttcggtttttcaacaccgagaaggtctaataacgttggtgcgaggtcgcctaggattccgccttcgcgcagcgtcacgccttctttcgtcacaatgacagggactgggtttgtcgtatgggcagtgtgcggttcgcctgtttctgtaatcagaatgtccgcattaccgtgatcagcggtaatgatggcatgaccgcctttagcgataatggcgtcaaccacttcgcctaagcattcgtccactgcttcaattgctttaatcgtcggttcgaccattccggagtggccgaccatgtcagggtttgcaaagttcaggatgatcgcgtcgtgcttgtcagccgcgatttcttttacaagagcatccttcacttcatacgcgctcatttcaggcttcaggtcatatgtcgcgaccttcggcgagttaatgaggatgcgctcttcgcccgggaattcttcttcgcggccgccgctcataaagaacgtaacgtgcggatacttttcagtttctgcaatgcgaagctgttttaacccgtgctgtgctaatacttcaccgaccgtattgtcaaggtttaccggtttaaaagccacatatccgtcaacagattcactgaagtgagtcaggcagacgaaatacaggtttttcggatgattttcaccgcggtcgaaatcgcggaaatctttgttggtaaacgtgtttgaaatctggatggcgcggtctggtctgaaattatagaaaatcacagaatcgccgtcatgaattttcgcaatgggttcaccgttttcttttgtgatgacggacggaatgacgaattcatcatgaatgccgttcgcataagaatcgtcgactacatccatcgcgctgcggtaagacgggccttcgccgtaagccattgcgcggtacgctttttccacacggtcccagcgtttgtcgcggtccatggagtagtagcgtccggaaatgctggcgatttcgccgacaccgatttcttcgatctgctcattcagctgctgaatgtaagttttcgccgtttgcggacctacatcgcggccgtcgaggaaaccgtgaatatacaccttcgtcagtccttcacttttcgcaagtttcagcagcgcgaataaatgattgatgtgactgtgtacgcctccgtcagaaagaaggccgaacaggtgcagcgctttgtcgttgtctttcgcgtttttgatggcgtcaaggaacgtttgattgcgttcgaattcgccttcgcggatggcaacgttcacgcgtgttaagctttggtacacaatacgtccggcgccgatatttaaatgaccgacttcagagttccccatctgtccttcaggcagtccgactgcttcgcctgatgccgtcagcgtctgatgagggtattggttccaataacggtcgaaattcggttttttcgcttgtgcgactgcgtttccgactgtttcattgcgtaatccgaacccatcaagaatgatgagtgcagctggttttttactcatattgaccttcctccaataattgaacgaatgactgcggttcaaggcttgcgccgccgaccaaagcaccgtcaatatcggactctgccatatattctttaatatttgcaggttttacgctgccgccgtattgaatgcggagcttgtcagcagtttcctgactgaagctttcagcaacgactttacggatatgcgcgcagacgtcgtttgcatctttcgctgtagaagatttgcctgttccgattgcccagattggctcgtacgcaataacggaagcagcaacttgctcttcagaaagacccgcaagcccttttttcacttgatcggcaacaagatcatttgtttttccggcttcgcgctcttcaagcgtttcacctacgcaaatgatcggcacaatgccgtgtttgaaagcggcatgcgcttttttgttaactgtttcatcagtttcagcgaacatttcacggcgctcagagtggccgatgacgcagtaatccacgccaaggtctttcagagcgaccgggctgatttcacctgtgaacgcaccgttttcttcaaaatgcatgttttgggcgccgactttcaggtcagttcctttaacagcagaagtcagcttttctaagaaaagagctggtgcgcaaacaacggcttccgctttgtctgctgctggaatggaagatttcacttcttcaacgaagctgacagcttcgccgagtgttttgttcattttccagttaccggctataattggttttctcatctgttccacttccttatagcagtttttatttatcgttcagcgcagctacacccggaagctctttgccttccatgaattcaagggatgcgccgccgcctgttgagatatggctcattttgtcagcaaggccgaatttttcaacggctgccgcagagtctcctccgccgatgacagagtatgtatcgtttgcctctgccaatgcttcagccactgcttttgtgccttgagcgaacaagtcgatttcgaatacgcccataggtccgttccatacgacaagtttgctgtttttgataacttcagcgtacgtttcgcgggttttcgttccgatgtcgatcgcttctaaatcacttgggatctcagagatcggcacgatttgaacgtttgcatcgttagagaaatcatcagcaacgagaacgtcttccggcatatagaatttaacgcctttttctttcgcgcggtccatgaatgattttgcaagttcgattttatcttcttcaagaagagatttaccgacttcatagccaagcgcttttacgaatgtgtaagcaagacctccgccgatgatcaggttgtccactttatcaagcagactttcgattacgccgattttgtcttttactttcgcgccgccgatgattgccgtaaacgggcgctcaggatttgtcacggctttgccgagaacgtcaagctctttttccatcaggaatcctgcaaccgccggcagatgctcggcaattccggctgtagatgcgtgagcacggtgggcagcaccgaatgcgtcattgacatatacatccgcaagctcagcaaatgctttagcaagctcaggatcgtttttctcttcaccagggtagaaacgtacgttttccaatacaagaacgtctccgtccttcatatcagaaatttgtgcttttacagcatcgccgtaagcttcatccgcttttttcacttcttttccgagcagttcgcctaagcgtgcagcgacaggagttaaacgaagctcctcaaccacttcgcctttcgggcggcctaagtggctcgcaagaaggactttcgcgccttggtctgcaaggtgtttgattgttggaagcgcagctcggatacgagtatcgtctgttacttccccgtctttcattggaacgttaaagtcaacgcggcagaatacgactttgccttttacgtcgatgtcttttactgtttttttattcatgccttaggagatcctccttcaaaatggtttgcatagcacgaaaaacgtgaaacgtgaaaccgcctcatgatgcttccgccgcggggcagattgcagcttccgggcacggggcagatcgtcttctgagccagggcaggcggctcagaaaacgaaagtgccgcggaaacttcaaaacgcggacgttctgcagcaatccggcgctttctgaaagccggttctcatggaaaaagggaaagggagtccgtccccttcccttgtccgctttcattatagcgtttctgtccgaaagaaccaagtccggccctttccgggagctatgaattaaagaccttgttttgcgatgtaagctgcaaggtcaacaacgcggttagagtagccgctttcgttatcgtaccaagagattacttttaccatgctgccttccataaccattgtagaaagagcatcgattgtagaagagttagcattgccgttgtagtctccggatactaatggctcttcgctgtagccgaggattcctttaagatcgccttcagccgcttctttaagagctgcgtttacgtcttcagccgttacgtctttgttaagttcagcaactaggtcaacaagagaaacgtttggagtcggcacacgcatagctccgccgttcagtttgcctttcagttcaggaagaacaagggaaactgctttagcagcaccagttgatgtaggaatgatgttttcagctgctgcacgcgcacgacggtagtctttgtgcggaagatcaagaatttgctgatcgtttgtgtaagagtgaacagttgtcatcataccgcgtttgatgccgaatttgtcgttaagtacttttgcaaacggcgcaaggcagtttgttgtgcaagatgcgttagagataacatggtggttagccgcatcgtatttgtcttcgttaacacccataacgattgtgatatcttcttcgttagcaggtgcagagatgataacttttttcgcgcctgcttctaagtgtttcgcagcgtctgcgcgttttgtgaagaaaccagtagattcaactacgatttcaacgccttgtttgccccagctgagtttcgcaggatcgcgctcagcagaaacttcgattgttttgccgttaacaacaaggttgctgccgtcaactttaacttctgcatctaattttccgtgtacggaatcatattgtaaaagatgagcaagcatgttagcgtctgttaaatcgttaactgctactacctcaacttcaggattgtttaatgctgcgcggaatacgttacgtccaatacgaccaaaaccgttaataccgacttttactgccatgattatttcctcctttaaataagtgagagatatttatattgagggactgttatcccttaataacttctttgcggctccttcgtccgtgacgagaaccgtgtttcgctgctttttaaaataagcttcgattgcttctgcttttgatgatccgcccgctaccgcgataatgtcgggaatggcatcgaggtcatcgagctgcattccgactgaatgcaccttgtgaacgacttctccgtccgcattaaagtagtagccgaatgcctctgtcaccgcatgattgtcatctattttcttcaaatcttccaaaggcgtgtttcttcgctccgccattgttctagcttcgccgattccgtgaacgagcatactcgctgatttaatcgtgtgaagcacctcttttacggaaggctcttcaataatagatgagtaggcgccttgtgacagctggccgggaacgaacaaaagccggtaagtgcctgaagccttttccgccatatgcgcgcatatggtgttcgcctggtttttcacatcttcgcctaaaccgcctcttgcgggcacaaacaggagctcgcggttttttgaatccggcgtcatcatatcggcgacggcttcaattgtcgtaccgccggttacagcgacgatatttttgcctgaaaatctctttttcatacatgcaacggccgctctccctaattcttttttgacccaaggagattggtcgctgtctccggaaacgataatggcgtctttcagattgagccgctcttttaatgtcttttccaaaagcgtcaatcctaaaacatccttcatcgtatcttccagaatcgaaagcagtgaatagccctcttccgtcattgtcatgccgtttgttttaatatcgatgagattttgttcttttaagaactgaacctcgcttctgagaacgcgctcggtcaatccgagactggctgcaagacttctgcggccgatcggttctgtaagcctgatatactgcaagatttcaaatcttttctgcatcacaagcaaaagatcaggcaataattttttttgagcttgtattaactggttcatgactcaaacgttccttcctattcatactggacagaaaatgtcccgctatgacaaaaaacgtcccatcatagccaaaaaaaattatgtctgctttctttaattattttaacaggatgacattgttaattcaactgttaaaggtcaattcctcgacattcttcgcaggatttaccagtatctccttgatacagtcattatatacagaaacggaatgaaggtgacagacaaaagcccgccgcagcggacttttgccgtaaaacgctttcattttatccagagtttttctatttcttctaatgatttatttttcgtctcggggcagatcgtcacgacaaacaagaaacagagaatattaatgacggcgaatatccagaaggtgtacgcgagccccaacccgctgatcatcatcggcacgaactggccgatcgcccagttggcccccataagaatatcgtcgcaataccggcggcgcgtgcgcggaggtggttcggaaagatttccgaaatcatgatccacgtaatcggcccgactgatacgcagaaagcggcgacgaatcccaatatgatgacgactaaagccggaccgctcgccagctgaaaataaaaggatgccccgattaagatcatgaacagcgccataaaggcagatccgacccccatcagctttttccggcctaccttatcgactaaaagaaccgcgataatggtgaaaatcacttcaacgacaccgacgatgcatgtcgtgataaaccccgcattttgtccgaagcccatcattttgaaaatttccggcccgtaatacgtaattgcgttcatgccgatgacctgattgaataaagccagcagaatcccgatcacaagcgcttttctcagccccggtttaaacagctgagacaatgaacccattttttctaattgtaaagacgtttcgatttgtttgatttcttctttcgcggtctgctcgccattaatgcgcgtcagcacggtgagggcttcattccggcgccccgctttcgcaagccagcgcggactttccggcacgataagcagcacgataaaaaagatgacggacggaatcatgccgtaagcgagcatccaccgccagccggtgtgcaccccccattcatacgagccggactgctggacggcaaggttaataaaataagtgccggagatccctaatatcgtaaacagctgatacagtgaggaaagactgccgcgtatggccggcggagcggcttcggtaatatacgtgacagaaagcgaggagcccatgccgattcccagaccgccgatgactctggcgatcactaaggaagacacactttgagaaagcgcagagacaaccgctgacaccgcaaacaacagcgccgctgccatcaatatctttctccgtccgaaccggtcacttaaaaatccggaaattccgacgccgaaaacaccgccgatcataatacttgaaatcacgagcccttccataaaaggacttaagcggtacaaatctttcaggaaaccgatggcgccggaaatcaccgccgtatcataaccgtacaaaagccctcccagtccggccgcgcatgagatgagaatgacaaaccacttcgaatgctgccgagtgacaggtacatttgagccaattggtgccgggtgattcttcatgaattttaccctcccgcgaataatagaataaaaacgcttacaaaacaaagtgcggcgcttgagttgctttgttttcttcagaaccgccacatttgtacgtacttataaagaattttatctaaaaataaggaaaattagtacgtacaaataaagaataagcagtttttcacaatctgtcaattatttttacagcttgatgaaagggcttactatgttatactggaatttgtccgtatacattttggaggaattgatatgctaccgaaatatgctcaagtaaaagaagaaatttgttcatggctgaatcagggaaaaatacagccggacgaaaagctgcctacggaaaatgagctgatgcagcagttcggggtcagccgccataccatcagaaaggcgatcggagatttggtctcgcaggggttgctgtacagcgttcagggcggaggcacctttgtcgcttcacgcacggcgaaatcagccatgcattcaaacaaaacgatcggtgtcattacaacgtacatatcagactatattttcccgagcatcatcaggggaattgaatcttatttaagcgaacagggctattccatgctgctgacgagcaccaacaacaatacagaaagtgagcggcggggccttgaaaacctgctgtccaaaaatatagacgggctgattgtcgagcctacgaaaagcgcgctgcagacgcccaacatcggctactatctcaacctggagaaaaacggcattccgtttgccatgattaacgcctcttatgcggagctggccgcaccgagcttttccgtcaatgatgtcaaaggcggcatgatggcttgcgaatacgtcatgtccctcggccacacgcacattatgggaatctttaaagcggatgacacgcagggcgtcaaacggatgaacggctatcttcaggcgcaccgggagcgcgggatttttccgtctccggacatgatcgtgacttacacgactgaagaaaaagaaaccgtgcttcttcaaaaaattaagcatacccttgagcaaaacagcggatcatacccgacggccattctttgttataatgatgaaattgcgctgaagacgattaatcttctcagagaattcggcttaaaggtgcctgatgacgtgtcaatcatgggctatgatgattcacatttcgcccagatttccgaggtgaagctcacctctgtcaagcatccgaaatccattatggggaaagcggcggcaaaatacgtcatcggctgcttagagcataaaaaaccgaagaaggatgacgtcgtgtatgaaccggaactcgtcatccgaaattccgtcaggcggatcggcgaataaaaaaagcaatgtgcgcggcacattgctttttttgctcagctgttttttaattcggcgatgatctcaaatgatctcattctgtcggcatgctcaaagctttctgaattcaccatgatttcatccgcctgtgttgtccggatgaagctttccagcttttccttcacacgctccggtccgccgacgatcgttgaactgagctgttcattgaccatcgctttttcatacggcgaccagatttgatccatgtcttcaacaggaggcttcagctggttcggcgtgccgcggacgaggtctaaaaatctttgataatgcgatgtcgccagatgctccgccttttcatccgtatcggcggcaatgacggtgacgccgaccatcgcgtacggttgatccagtacgtctgacggacggaaggagcttcggtacagctcaagggcgggcacggtgtttttcggtgagaagtgagccgcaaaggcgaacggaagcccgagctctcccgcaagacgcgcgctgaagccgctcgatcccaaaagccagatcggcacgtccagcccttcgcccggaatggcgcggacttgattgcgcacattgcctgagggtttgaagtaatttctcaattcttcaagctgctccgggaaatcctccccgctgtttatgtttcttcttaaggccctcgccgttaattggtcggtacccggcgcacgcccgagtccgaggtcaatccgccccggatataacgtttcaagggttccgaattgctccgcgattataagtgacgaatgattcggcagcataatgcccccagaaccgacgcggatttttttcgtgccgccggcgatgtggccgatcagcaccgccgttgccgagctggcgacaccttctatattatgatgctccgccagccaatagcggttatagccccactcctcggcgcggtgcgctaaatccatgctgttgcggaacgattcagcaaccgttcccccctgtacgaccggcgataaattcaatacggaaaacgcagtatctttcaatgtatgttcagccatcgttttctcctttatggtttagtgtaagcagatcttaaacaaggtctctaccacacaccttaccacagcttttcccgtgagttaaacaatttgattcgatgatcttcgaacaatcagtcagcggtcgtcactagtgaactctgtatgaatgaatctattacattcagatatgaagagcctagaatgatataaaaatgaaaagatatcattgaaagaacagaaccaataatgttaacatatgtcatatattgaataggaaggaagtcatagtctatatgcgtaaaaaaatcttaatggcactcacaacagctttactggcagcaatcttctttaccggaaacaccgataaggcatatgccgcagacttttattccggcactcagcagcatttaaatgtaagcggatttaccgatgcctcctactacacgaaaaaagcgaaaagtgtcgattttactctcagtacagcgtatccgtcagatcgaacctttaaaggaaacctatacttacagcgaaagtccggaaagaaatggacgacttgcaaaaaaacaaccttttctttctcagtaagggtgactaagtcattctctttaaaaggatgcaagacaggttattatcgtgtcaaagctacgttcagcggttcaaaacttgtcaatacgacaaactcttttaaaattaaccgataagattcagggccctaagatcattagggcctttttattcattctttgtgagctcctgcgcgatttgaataaaaagttttgccgccaatgaagcctcttttacagaaggaacggcaagcagaacatcacggtacaccgcctgattgagttcccttgtcacgacattttccggcagtgatattccggacatagacatttgtgataatatcgcaattcccagcccctctttgatcatgctgatggacgtattgacgttgtaaacagtgaatgcggcagtcagcacagaccctgcctccttaaacatatcaataaacggtgattcgtatcctccgtcacagatgatcatcggctggcggtcaagatctttcagagtaattgactcacagctgcaaagcggatgatcatttctaagcacgacggccattttatcttttttcagcggcagatattccatgtcttccgtaggaaaaagagtgatccccacatctattacccgggagcggagccattcctttacttcgttaaccgttccttcataaagcaccaactcaagtttcggataccgttttttaaacacgctgatcagttttggaatgaaataagcggaagcggccggaaatgtgccgatgtgaatcgttccctgttcaagccctctttccgcggccgccagctgctcggctttttctatgcctttgagcacctctctgatatgaacgagaatttttccgcccgtgtccgtgagccttacgccgttgcggcgctcgcggatgatcagcttgatgccgagctctgactcaagcgccgagatggcatggcttacggcgggctgtgtcatattcagcgcctgccccgcttttgtaaagcttcccgtttcagcgatttgaacaaaaacccgcagttgtgtaatcgtcataacgttttacttatgctccttataaaaaagattcattttatttatcttactgattaccgtatcatatgatggaattgttctacaaggagtgaacgacgtgaaacagctttcgaaaatacagacggctcttatgctggcgtttctagtcacggtatggggaattaactggccgctgacaaaagccgcgctcgcctattcgccgcctcttctgtttgccggaatccgcacgctgatcggcggacttctattattaatggtggcgctgccccgttttaaaaagctgcgttttaaagaaacgtggccgatctatcttatttctgccattttaaatattactttattttacggcctgcaaacggtcggcttgaattacctgcatgccggcttattttcagccatcgtgtttttccagccggtgttaatgggcgttttttcttggctgtggctcggggaatcgatgtatcctttaaaaatagccggtcttattctgggctttgccggtgtcgccgtcatcagcgcagccggtttcggaggccatatttccatcgccggcattcttttggctctgggctccgcggtcagctgggcgctcggcacggtatatgtgaaaagaacgggcggacgcgcggactctatctggatggtcgctcttcagcttctgatcggcggcgtgctgcttgtcagctccggccatttttcagaaagcttttcagcgattcaatggaaaactccgttcattctcagccttctgttcatttcggtatttgtcatcgcactcggctggctcgccttttttacgcttgtcggttcaggggaagcaagcaaggttgcctcttacaccttcctgatcccgctcatatccattgtcgtcagctcgatatttctgcatgagccgctgaccgtcagccttttagccggactgcttctgatcgtcacaagcatttgttttgtgaatataacaccgaagaaactgaaaacacctgctctggccgcagaaaaaaaggccgttcattaaaaaaactcttgccgcggggcaagagtttttttatttattgacgtctccctttcacgagatacgcagccgtaatgagcaggtagatggccgcagtgatgcatgtgatgacgatggacgtcgtcgcaattacgccgatcaggatggccaaaagcgcaagcaccgcgaaccatgtcgtgtacgggaaccatttgacgtaataagccggctgttctgttgaatgttttcttgattttaaatgggcgaatccgataatcagccagatgaacagcacggtatagccgagggaacccatcaaataattaaacgtccggcttcctgcgaataaagaaatcaggacgcctacatataaaaatgacgtacaagtcagaatcgcatagacaggaacctttttcttcgatagttttgaaaagattttcggcacccggccgtcagaagcctgcgtaaataagacgcgggatgatccgtacagtcccgagttcatagacgagataatcgcaagaagaatgacggcattcataatatggtcggcacccggaattccgatcatcttaaatactatgacaaacgggctttcgggaacgctgttgacttgattccaaggaatcaggctgacgatgatgaaaaacggcagcaagtaaaaagcgacaatccgcgttaacgtgcttcggacagctttcggaatcaccttttcggggttttttgtctccgccagcgtgacgccgatgatttccgttccgccgtatgagtagatcacgacgagcatcgccgtaatgacgccccccgctccatgcgggaaaaaccctccgtgatccgttaaatgagacagccccggcgccgtgtgattgccgaatgagaaaaataatagcagaattccgcataaaataaagatgacaatcaccgtaattttaatgagcgcgagccagtactccgtctcggcaaacagtttcacagaaagcatgtttacgaccgtcaccacgatggaaatgatcaaagccagtatccatatcggacattccggcagccaatattgaatgaaaatggcggctacgaccgcctccgcggcaatattgagcacccacattttccaatagatccagtctaaaaagtatgcagcgtacgaaccgagagactgctgaaccaaatcacggaacgtccttgcatgtttgtttctgacggccatttcggccagcccctgcataataaacagcagaatgattccgccgaggaggtaggccaacagcacggacggccccgcttcatcaatcgccgtgctgctgcctttaaagagcccggccccgattgcgcctccaagcgccatcatcataatgtgtctggacgacatcgtccgttttaacgtttgcttgtccttttccatctatcacacgccctctcgcaaaaagtgttcatcacataaaaaagcacgccgcctctttaggaaaagagacggcgtgcctcaggcagccgcggtaccactcttgttgatcccgaatatccggaatccagcttaaaaaccttttaacgaaggtcagccgttaggacatagggaatattccgacaattccgttccgccctgccacttccgggcgagttcaaagaacaatcagtccgcgtttcaccaacccgcggctctctttttctgactggattctcttactgctcccgttcacagtgttttatgttaaatgaatctcttgagtttttattttctgaatatagtaacataatatacagtcttctattttcaaagtcaatactaattttttccgtctattgtccttcccggtgattcggaaatttcagctgaaatccggacacaaggctttgctttccggcgccatgctttccgctttcacctttgtgtttgcgtataaaaacagcgcaagcgcaatgccgaatgatatgacgagaatccatgcttttttcattcagatgcctcctcactttctatcatcggcggctttttctctttttttacacacaaaattgaaaaaacaattttaaaattctgttttccttatattgaaacttgctttatcataaaagtatgcgtttacattcgagtagggaggttatagtatgacccctgtgaattcaagcagcatcgggaagattcaggcggccagcaaaggtttgtcgccaaaattgagagcgattgcagaccatatcgtgaaggaaccgaaagacgtggttcacctttccatcattcagctggccgaaaaaacgaaaagctctgaagcgacgattttcaggctgtgcaagcggctcggtttttccggctatcaggatttaaaaatcgcgctggctcaggagatcgttcaggagccggtgcagcacattcatgaagaaatgagccccgacgacgatatcgaagtcatcatccggaaagttttccgcacaaacatttccggtctgaccgatacctttcaattattagatccggccgacgttgaaaaagcggtagaaatgatccaccgcgcagacagaatcgaattttacggaaacggcggttccgggctgatcgccactgacgcgtatcataaatttatgcgtacgggtataaattgcatcgcgcatacggattctcactttcaggcgatgtcagcgggtcttctcggtcctgaaagcgcagtcatcggcatttctcattcggggagcaacaaggacgtgctcgacgcggtcaaaacggccaaatcgctcggcgccggcacgatcggcattacaagctaccaaaagtcgccgctcacccagatttccgacgttgtgctgtatacatcaacaagggagacggctttcagaacggaggcgatgtccgcaaggcttgcccagctgtcggtcattgatacactgtatttcgccacggcccggctgcggcaggagaaaacgctcgccaacttgcagcaaatcagaaaaatgatcgcgcacaaacgtttgtaatcgttttctaaatatttttttcaaaagagagaaagccgatacagcgggaattgaggcaattttatgaaaaaatttttcttcttcatcgttgatttataaaaaaattattcctataattgactttgtaagggcatacattataaatctatcttattattcaatcagattaggcgggatatattatgaaggaaacccaagctgttatcggtctggatatcggcacgaccagtacgaaagctgttctgttcggaccaagaggcaaagtgttagccaagcattcggttcactatgatttaatacagccaaagccggcatgggccgagcaggatcctgagcacattttggaagcggtgatcggaagcatcaggggcgccgtcacaaaggccggactgagtcctgacaatctgcttgcaatcggcatcagcaccgccatgcactcattgatagctgtcgatcaaaacggcggcctgctgaccaaaagcatcatttgggcggacaaccgcagcgccgagcaatcaaaacggattttaaaagagatgaacggttttgatatttataaaagaacgggtacgccgattcatccgatgtctccgctttccaaaattgtgtggatgaaagaacaggacaaggagacattcgcgaaaaccgccaaattcatcagtattaaagaatatattctgcacgagtttttcggaacttatgtcgtcgattattcgatcgcttcggcaacgggactgttccgattagatacgctttcctgggatgaagaagcgctcaggattgccggaatccgggaagatcagctgtcggacattgtgccgaccactcatcagctgcgcggccttgcgccggaaatcgctgcacggatgggcatccatgcggatacaccgtttattatcggcgcaaatgacggcgtgctcgccaacctgggagtcggcgcgatcggcaaaggcgaagtggccgttacgatcggaacaagcggagccgtgcgttcggtgacggatgcgccgattacggatgaaaaagcgcggacattctgttacgcgctgactgacaagcattgggtcatcggaggcccgacgaataacggaggcattatgctgcgctggcttcgagacgaattcgcttctccggaagttgaaacggcgaagcggctcggcattgatccgtacgatttaatgattgatattgctgataaagtgcccgcaggctctgagggattgctgtttctgccgtttttatcaggggagcgcgcgccgttttggaacccgaatgcccgcggaacgtttttcggcatcagcctccgccataaacgggagcattttatcagagcggtgctggaaggcgtcatcatgagcgtcttttcaatcggtgtcgcactgagagatttggcgggccccgcaaaagacgtgcgggcttcgggaggatttgcgagatcgccgctgtggaggcagattttgtccgatacgatgggacgcgaagtcctcgttccggaaagttacgaagcctctgcgctcggagcggccgttctcgctttgcacagccttggcgaaatggaacggatcgaggatgttcaggactggatcagaatttcgcaccgccatgaaccgaacgtcaaaaacagcgaaacatatattgagctgttttacttatacgagcggctgtatgacaagctcaaagatgaatttgacgtcatcagtgaatttcagctcaaacaaagccgttaattcttctttgaaagaaagggtgaaaaggtcatgttactgtttattgtcattgccgctattatcgttttactcttattgattacggtcgctaaattaaatccgtttatcagtcttttgattacatccatccttgtcggtttcgcaacgggcatgaatctgccggacattatcacttcaatgaaaaccgggctcggcaatacgctgtctctgcttgcgatcgtgctggccctcggtacgatgctcggaaaaatgatggctgaatcaggcggtgcggagcggatcgcccacaccctgatcggccgcttcggcaaaaagaaagtgcattgggcgatgatggccgtcgcttttattgtcggcatcccggtctttttccaggtcggcttcgtcctgctcgtgccgcttttgtttacgattgcgattgaaaccggggtttcattagtgacgatcgggattccgctccttgcgggactttccgtcgtgcacggattggttccgccccacccggcggcgatggcggctgtcggcatttatcacgccaatgtcggaaaaacgattttgtattctttaatcgtcggtattccgactgccatcatcgcggggccgctttacggaaaatggattggtaagcgcattcataaacccgttcccgaactgttgaaaaaacaatttattgaacggaatgaaaaacgcaagcttccgggattcgcaaatacattgtttacgatattggtaccggtgatcctgatgcttatggcaacgcttgccgaaattgcgcttccggaaaaaagcacgctctatgaaacttttaaatttatcggcgaccctgtcacggcgcttttgatcgccacggtttactcctttttcagccttggtttttatcagggctttgacagggaaagcattttaaaattcagcaatgactgtctgggaccgatcgcttccattctgcttgtgatcggagccggcggcgcttttaacaacgtcctgattgattcaggcgtcggcacgtatatcgctgacatggcgaagcactcaagcttctctcccgttcttttaagctggacgatcgcggcggtcatccgtgtcgccacaggttcagcgactgtcgccatgatgacggcggccggcattgttgctccgattgcatctgtcatgccgggcgtcagcagcgagcttctcgttttggcaacgggagcgggctctttgattctgtcacatgtcaatgactccggtttctggctcattaaagagtatttcggaatgacggtaaaagaaacgttcctgacatggacggcgatggaaacgattatttctgtcagtgcgatctgttttatcatgatcattaacgcgtttatataaaaacaaaccccggccgcaaaccggggtttgtttttttatcggtcattcacgaggatataagcggctttaacgggtccgtggacgccgacaaccaaatccatttcgatatcggccgagttgctcggtccggtaatatagttgatgcaggaaggaacggtgacgccgtctctgatctgctgtttcagtatatcgctggcctgtgtcattctcggcacaatggaagatttcgggatgattgcgatataggtggtcggaagcaggctgacggaacggccggcatgctctgacgcatacaaaacgacggtggctgattccgcaagcgtgatctcgctgaatgtgatgcccacattcgcttgttccgctttttcaatatttttcgctccttgttccgcgtcccattcccaaacgggaatcccttcgtccggccactcttctgtcataagggtctgcaagccgtacatttcaaaccggctgtcgttcggaatgatgacaggccccccttcaaagcggttcacctgcgtgcgcaaagcgtcgtaaagcccggctgcatccgtttcgatcagttcggtatgaatgttgacgcagtggtctttcagcatcgtgacaagatcgtcttccgtacagtccgcatgcgtttgatattgaggctgatacttccattcaggcagggacacgcctgatttcctgcgctctctgcccagacttccggcgatccggtttagaaaggattcctgatgtgtaaccgtccctttcatcatcattcttcccccttttgtttttcccggtctttaaaccaatctctgaatctcgatttatgcggcgccgggaagtcccgtattgccgtccattcttttaacggccccggcccttttgatattttgtcatcctccgtaaacggcgtcatggcggcaggcgcccatttcgatcccagtttataaagggacggggatgacgagccgagcccgaaggctttcatcgccagtttttcgctgatcggcgctttgccctctttttccacaatgttctgccgatgcttgagcagcagctcgtgcagcggaattttaaccggacacgcttccgtacaggccgcgcataaggaagatgcgtacgggagctccttgtattcgtcatatccgccgagaagaggcgataagacggcgccgatcggacccgaatagatggacccgtacgagtgtccgccgacatgccggtacacgggacagacgttgatgcaggcggcgcagcggatacattgcagcaccgattggaattccgtgccgagtatgcgggaacgcccgttatccacaaccacgagatgaaattcctcaggcccgtcagcttctccttgctgccgggggcccgtcagcgccgtaatgtaacttgtaagccgctggccgaccgcgcttctcgtcagcatgctgacaagcacttcaaactcagaaaatgaaggaacgatccgctccattcccatcacggtgatctgcgtcttcggcagcgcggacacaaggcggccgtttccttcgtttgtcacgagactgaccgatccggtatccgcgattgcaaagttgcagcccgtgatgccgacatccgcttcgagaaattttttccggagaacgctgcgcgcgtgcatgacgagctcttccggtttttccgtctgtttgtattcgagtctctctttaaacacgtcacggatctgctctttgtttttgtgaagagcgggagcaacgatatgtgacggcggatcgtgatcgtcaatctggagaatgtattcgccgagatccgtttctgtgacttcacagccctcttcctcaagcacttcgttcatattgatttcttctgtcaccatggatttggattttacgatttttttggcgtttttctgccggatgacatcgcggatataggaggacgcttcttccgccgtttcggcgaaaaagacatgcccgcctctgttggcgacgttttcggcgagctgttccaaatagaaatcaagattgtccagcacatgctgtctgatttcttccgcatgtgaacgccaatcctcccagtttcccaattcctcggccgcctgaagcctccttatcctgagccgttcctgcgctccggagacggctcctctcataaactcattatctattccttctgatacccgctctttaaaagcggcggtaccgattttcatcgccatgattttacccccttgttgtttctcgtcttatctgctgttcagcacttctgcgatgtgcatgactctgacgtttttatccttacggtcaagacgcccgccgatattcatcagacatccgcaatccgccccgatcagcacctcggcctccgtgtcttccacgcaggcgaccttttcatccaccatttgttcagagatttgcgccattttcacagaaaatgttcctccgaatccgcagcattggtgttttccgggaagcgcggtcagctcgagccccttgacatggcgcaaaagcttcatcggctcctccgacacgccgagcagcctcgtcatgtggcacgatgtatggactgtcgcttttttatgcagcaccgccccgacatcctccaccccgagaacgttgacgataaaatccgttaactcatatgttttgtccgcaagctgctgcgcttttgcggcccacttcggatcgtcctgaaacagatgcggatattcacggaacatcgtcgtacaggaacctgacgggctgacgacgtactccgcttcttcaaacgcggcaatcatccgcttcattgcttttttcgcatccgtcacatacccgctgttgtatgcgggctgcccgcagcaaatctgcccctcgggaaaatccacctcacacccgagccgttccagcacctcaaccgtcgcctttccgacattggtctgaaacatatccacaaggcacgtgacaaataatgagactttcatgatgaacccctctttcatcctcagtatgtgatccggtcatctgatgacctgtttttggaaagctctataaatatcctacactattctgaatatggattggaaggtttttctgaaaaatcctttcgcccgatgcgctgaagggtaaaaaaaagagaagcctgaaagcttcccatgcttctctagatcccgtttttcagcaggtgtcccagtttttgcacaccctcttttatcgcggctttaccgggaaaactgaacgacaggcggagatattcggcaccgtcttcctgatgcggaaaaaaatattttccgggtacataggaaacgccgtgagacagagccctcgccagcagtgcggacgtatcagcccccggcgctttcacccatacaaagtaaccgccttcaggcacgtgccaggatgcggattccggaagatatcgcgctgatgcggcgagcaaaacatcacgtttgcttcgatatgcttcccgcaaggcggcgagccgttcttcaatattcgtttgttccagatagacggcggtcaccgcttgggaaaacggatggcctaagtctttttttaaccatgacaatgccgtgatgaatgcggcgtcccctgcaatccagccgatcctcatacccggggcgatgacttttgataatgaaccggcgtacagcacccggccgttttgatccatggctttcaagggcggcggaatatcggtgaatccgagctcgccgtatgcatcatcctccaagatgagaaaatcatacgtttcggcaagctgaagcaggcgggttctccgcttcgatgacattacggttcccgccggattctgaaaagcgggtatcgtgtagagaagacggggaagcacaagcccttttcgttttctttcctcaagcataaacgctaatgtttctgtttgcagaccctcttgatctgtcggaatgctcatgatatgcggtgtataatttttaaaaatctcgagcgcttccatatagaccggagcttcaacggcagcggcggtttgttcatcgaggaaaacccgcgcagccagatctatcgcctgacaggcgcctgatgtcacgatcagctcatcgtcccggcagtgaatgccgcggatggctaaccgttcttgaatctgcttttttaaaacggccgtcctcgggcttcctatataatgcagcggcagatcacgctcctcatccagaaggcgggaggcggcttctttcagctccttatcaggaacgagcgcgggatcgggatagccggaatgcagagggatgcacgctttcggaactgccggcatccattccccgggaggatcatttgtcagagctttctttacatggtcagaaaaaaaagattcggcctgcatgtgatgttatcccctttcacaagtcagcttctatacattttcttcaaaataagcccccagcacttcttccacattcgtcaggtgcgccgtcatcgctgcttccgcttcatccgtgtctccggcggcgacggcgctgtaaatgcgttcatgctcttcatacaatcgctgcacgctcgttcgtttagaaaacagccaaatttttctcgtttctctcattgtttccaaaaggagcgcggagacatgattcatgagatgcttaagcagcccgttttgtgatgcttccgccagcgccatgtgaaaggagaaatctgctttttcgcccaattcttcgtctccgtcaatgtctttcatctccatgagagcttggcggattttttgtaaatcgtcttcggtgcgtttttcagcggccatggcggcgacgccgagttcaagcagctttctgacttcgagcagctgtttgacgtcctcttttttcatcaagagggcggaagaaagcggctgggaaacatgagacggctcaaattctcttatgtatgtgccttctccctgcttcatgtcgacgagccccatcgctttcaaagccgacagcgcttctctgaccgccgagcggctgacctgaaaactctcggaaagcgcctgaacagaatcaagcttttcccccggcttaagctcgcccgcttttatcttctccagcaatgcgtcagcgacttcctcgtagatttttttcgttttaatttgtttatatttcaacgcgatcaccccgtcacttgtgaatcttgatgtttatcgtctattatacttctttttttgtgtagccgacaggttcagacaatttgttcaagaaaagtattgtactttcaaaactttcaaaatataatgctaattaacccggtcatcagatgaccttatcataaaaagtaatcgtttacatgacataaggaggggttttttagggatgcaatggacacaggggtacgctcctttagggggaaatttgcttttatcggcagcttgcgcgctcgtgccgattatcttctttttttgggcgcttgcggtgaaacggatgaaggggtacatagcggggcttttaacgttagccgtttcacttttaatcgctgtatttgtttacggcatgccggcggaaaaagcggtgatgtccgcttctcagggagcggtgtacgggctgcttccgatcggctggattatcgtcacatcggtctttctgtataaaatcaccgtgaaaacgggacagtttgagattatccggagttcggtgctctcaattacagatgaccggcgtttgcaggcgctgctcatcgccttttcattcggggcatttttagaaggcgccgccggtttcggcgctcccgtcgcgatctcggccgctttgctcgtcggacttggttttcagccgctgtatgcggcgggaatttgcctgattgccaatacggcgcccgttgccttcggtgcgatcggcattccgattaccgccgtcgaaggtccgaccgggataccggcaatggaaatttcccaaatggtcggccggcagcttccttttttatccgtctttattccgctttacttaatcattttgatgagcgggtttaaaaaggcttttgaagtatggccggccattcttgtttccggcgtctcctttgcggccgtgcagtacgcaagctcgaattttttagggcctgagcttccggatgtgctgtcggcgcttgtttccatggccgcgctcgctgtatttttgaaattttggaaaccgaaaacggcctttcgtttcgcggcagaacgggaatcagcagcggccgctgaccgggcgccgatcaagtacgggggcgccgcggtgtttaaagcgtggtctcctttccttcttctgacggccatgatatccgtttgggggattcccggcgtgaaggctgctttaaccggtcattatgaaggaacgtcaatgtggctttcctggctgaatgcagccgggaaagcattgaccttcacgcctcccgtcccatttgtaaatcagcagattcttcaggcggacggcacgccgattgaagccgtgtacaaacttgagcttttcggttcagcgggaacggcgattctgattgccgccgtcatctccaagttcgccctcggcatgtcgtggaagacgtggggcgaagcgtttatagaaacggtgaaagagttaacgcttccggtcgtgaccattgtttctgttgtcggctttgcatatgtgacgaatgcttccggcatgagcacgacactcggtcttgcgcttgccatgacgggcgcgatgtttacctttttttcgccggtgctcggctggctcggcgtatttattaccggctctgatacatcggccaacctattgttcggcggattgcaaaaggtgacggcgctatctgtcgggatggacccggttctctccgttgccgccaattcatcaggcggtgtcaccggaaaaatgatttctccgcaatccattgcggttgcctgtgccgctgtcggtctggcgggcaaggaagccgaccttttccgctttacgattaagcacagtctgtttttgcttctgctcgtctgtctcattacatttttacagcatcatctgttttcatggatgatcccgtaacacggagaacctccccggggtttggctcggggaggtttcagctgtaccgttttctcgccgatgacggcggaatatttaattggtcacggtatttggcgacggtgcgccttgagattcggatgtcatattgttcatgcagcagatcggcaagcttttggtctgaaaaaggtttctttttatcttctttacggaccaatgcttccagatgcgcttttacggcataattggaggcgccgccgtcccccgatgattcagctttcgccgagaaaaatgttttcatttcatacagtccgtacggcgtctgaacgtacttccctttgatggcccggctgatcgttgattcgtggagctccagcgtttccgccacctctcttaaggtcagcggctgcattccgctttttcctgtgagaaaaaaggattcctgccgttcagtcaggacgccgataattctcgtgatcgtttgttttctttgcgacaaagcccggttcagccagcgccattcctgatattttgccgacagataatttttcgtgtcacggcacccggcggctgacaagagcggctgataatgggcatgaagctggatgtcaggaaacgaacggctgttgagccgcgcttgaatgatgccgtttttcaccgtgatgaaaatatccggttctacgtaaaaacccggctcctcatgcgcataacggagccccggcctcggatcaagcgcgctgatcatgtcagcgatgtcctgaatgtctttaagcggaatgcccgttttaagtgtaagcgctttccaattctttcttgcaaatagctcaaaataggcttcggcaatccattccgcctgttcgttccgctcgggcagacggcggagctgaagaaggatgcattcctgcaaagaccgggcgccgattcccgcgggctcaagggattgaagctttttcagaaccgcttccgtctcctcttgtgaagcggatacatggtcggcggcggctggtatgtcctcttttaaataaccgtttgaatccaatgaatgtatcagataattgaaaatttttttctcatcatcggacagcttcatgtctaaggcttgctgtttgagcgaatcctgcagcgttttgcgggtaagtctgatctgctggcttccgtcccgttctttcatcctgtttttatttgttttatggtaagatagtggcggcgtgtctgtttcctttcgttcaatcagagggttttccagtgagagctcatcaatatatccggccagttccgcggaattgtatccgagtaatgtgatggcctgtttaagctcttgcgttaattgaggctttaacatttgtgtttgctgaagtttgatatccatcatgctcactccccttttttcattgtacatgattggtttcataccgtatatacttattaaaaggagttgctttatagatgtcagaacttttttctgttccctattttattgaaaactttacacagcacattgaaatgaatccgaatgaagaccgaattcatgcgatgaacagctattaccgctccgtcgtctcaacccttgtacaggatcagctgacgaaaaactcggttgtgctcaaaagaattcagcatttggatgaggcgtacaacaaagtaaaacgcggagaaacaaaataaaccttccgctcattcaaagcggaaggttttccttcgtgccggcggtttcaccgatcagccggacgtccggcgcttcgtgcgtccaggtgtaataatagttcgcgtttttcccgtatgaattatcaatgacggtattcggtttcccgagaagcgaggacaggatgtggccgtggagccttgacgtttccaccgattcgtacctgctgaaaaacaggaccgcttttttcgttaagaaatcggaatagcggttccaaaaccgcgcaatcggcagcgggtttcccgcttttttattcaaaacattcagcgtttggaaaaaagcgattcccctgcggtcgcttgctgacagaacatcctgccagtcacagcttttaacggaagaattgttttgcagcttcgggttgatttccccatccgtgcggataaaataaagcctgccgcgtgacggaaccgctgacgccgcgatcggatacagctgatgggccatatcaggcataagcccgatatgattcgccgaaaaaaagcgtttcgcagtctcgtatgacacatgatctctcgtaaacaggtggagatccttgtgctccgcaaaaagcgccgatgtcttttgcagccgtgtctcatcctgataataaatcgattgcggcaggatgacgatcctgttttccggaaaggatttgacgattttttccctgaacgtctgatagtacggatagagatccccgaaatttccgccaccctgacagacgatgatcgtctttttgtccgcccggcgcccgaatggaaaattgtcgggattccagcgctgtttcacgcggatgccgtgcgctttaaaaaacgcctccgtccctttcataatcaataaatcccctacatttccgtagaggggatagtcggcatatatgatgtcggattgcggcggtataacgctgagcagacccgtcagcgtctcttttaatcggctcataacatggcggctgtccatgttttctcccctttcgtttcaaacagttgcgcaagtgcgtcaatgacacgctgctgctcctcagaagacaggtcagacccggacggcagacaaatccctcggctgaaaaggttctcagagacacgctcatggtcgctgtgaggataaaagacggaagatgagaaaagcggctgcgtgtgcagcggtttccacagcggccgggcctcaatattctgttccgcaagacaggcgacggcttcttccggcgtcacgccgttatcaagcgtcagagccgtcagccagcggtttgaaaccgttccttcaagctccggcatcatgcggatgcccggatatgtttcgagcgcttcccgataccggtgaaagatttctctcctcgcccggacgcgatcttcaagcacttccagctgcgatatccccacgcccgcgagaatgttgctgagcctgtagttgtaaccgagctcgctgtgctggtaatgaacggcggcatctctcgcctgtgacgcaagaaacctcgctttttcaatcgcggcttcatcgtcagacacgagcatgccgcctcccgatgttgtaatgattttgttgccgttaaaggaataaatgccgaaacggccgaacgtgccgctctgcctgcctttatatgttgatcctaaggactcggcagcgtcttcaatcagacagacgccgtatgcgtcacaaaggctcattaattcatccattttcgcgctttggccgtaaagattgacggcgatcaccgctttcgggagtctgccgcgccgctttgcatcccggagcgcccgctcaagcgcagcgggcgacatattccacgtctcccattccgaatcaataaaaacgggctcagcctgctcatacacaatcggattcgccgtggcgacaaacgtaaaggaaggacaaaatacaacgtctccttttttcacacccgcaagccgcagggcaagatggatggcggccgttcccgagcttaaggccgccgcgcttttcactcccgcatattccgcgagccgcgcttcaaacgaattgacgagcggaccgagcggggcaatccaattggttcggaaggcttctgcgatgtattcctgttcttttccgctcatatgaggcggagacaaataaatccgtttgtttgtttgcatgaaatcatcctttttcattatggataggggagatgacgcgggccggaacgccgaccgccgtcacatggccgggaattctgctgatgaccgcagcccccgcgccgataacggaccaagggccgatgtccatctgcggtatgacggacgcgccgattccgatgtgcgttccttccccgactttcactccgccggcaagcgccgcgcgcggtgaaagatggacgtaatctccgattgcattgtcgtgatcggcaaccgcccccgtattgatgatgcaatgggcgccgatgtcagcgcccgcctgaatgacggcgcccgccatcacaaccgttccgtgtccgacggaagccgtttcactgacgatcgccccggggtgaatgagtgaagcataatcggcagcttcaatcccaagcgtttcagcgaactgctttctgacgccgttgcggccgatgcatatcgtgaacacggcctcggggacgagtttccgaagcatgtgcacgtcttccgtccggcccgtatataaaccgttccgagcggtaaaaccgctgaatccgtcgtccaatatgcccgcaagctccatatcggaacgggcctgcacgatttccttcacgacttttccgtgtccgccgtttccgatcagcacgacctttttcacgatgacatatctccgctgcctgtgaagcgctttgccgtcacatggccggcttggtgtatgccttctgacacgagaacttttttcactgttaaaagcagaatctttaagtcgagaagaaaggtgcggttgtcgacgtaccacacgtcgagcttgaatttctcctcccatgaaatcgcgtttctcccattgacctgcgcccagcccgtaatccccggcttcacctcgtgccgccgcgcctgctccgccgtgtaaagcggcagataatccatcagcaaagggcgggggccgaccagactgatatcgcctttgagcacattaaaaagctggggaagctcgtcgatgctcagttttctgatcagccttcccgttttggtcaggcgcagatgatccggaagcagcacaccgttttcatcacgcgcatccgtcatcgttctgagtttatacaacgtaaacggacgcccgttatgccccggtctcgtctgtttgaacaataccggagacccgatggcgcatctgacggctgccatggcgaagagaagaatgacactcgcgccgcacaataacagcgtcgcggccgctatatcaaatacacgtttcaccttcaaatctgaacagctcctttcacttttcggcatttctgtaaagcaagccgcctttcttctttcgtacaaatgaagaaaaaagcgaatgcggcatagcttatgcatacggcaagccccgcggcgatcagaccggcccagccgtcaagcggtgaaaacagccggataccccggcagacggcccaggcaaatacggccgccgccaacgggccgaacatgcctttgtaaaacgcggttttctgaaagccggtaatatgcgaaacatacagcggcgtgaagacggcatttttcaaaatgagggagacagccccggcaatggtgatgccgtacagcccgagatgtgccggtccgctgagaaccacggccaatatgacattcagtccgcctaaacataaagtaacgacggcgggcgttttttgtttattaaaagccgtccatacgtaaaaaagcggcatgacagagagactgaccaccaaatacgcggcgtgaatatataaaagcggcgccgtctgcacaaacgacgggcccagccaaatcgccagaaacggttcggcaagccctcctaataacgcggcgggaagcgcgaggagaagcccgttcatccgcacggccttattggcgtaagacaggagaccttccatatcgccttttgaataataggaagtcaaaaccggcgcaaacagtgaagcaagcgtcccggcaagacttctgagcagaagcgggaattgaataatcgccgcatagacacccgcttcagacggccccagcacaaggttggccgtcatgaggtcaatctgcagaaacagcagcacgccgatctggttgacagaactccaggcaccggccgaaaacagcactttgcttgtctgtaatgataaagttttacggctgaaagaaaaccacggaatcaatttcttaaagaagaaaaaagtcagcacagctgcacagacggctcccgctaatgccgaaagctggatctgccagatcttcggcggcaggcacgtaaacagagcgagcacacacagcaccctgaccagcatttgcacggcctgaatggaacttgtgatataaagcttgttggcaaaaaacggccccgtcgcgaaccccgccataaaaaacgtcagcataaacagcacgctgccgattacgatagacagcctcacatccgttaagagcccggccggtacattcataatcctgtcaataaaaaaagcagtcccggcgagcggcacagcgagtaatagagatatcacgacagacgcggctaaataattgcttacatacgcattggcctcgtccctgttccccctgtgggcggcgacggagaaaaacctcacaacgactgagctcagcgcaacggtaataatagagaaatagttaatgatattctgtgtcagatggacaaacccaaaagcctcaacacctaatgttttcacaataaagggcgtcatccacactgataaaaacaccgatagtaaaaacgccgtcacattggcgccgaaattaatggcaaatttcatgctccttccgcactgcctttctctttcgatttccgttcgaaaaacgcatgcagaagaagaggaaggcgcattttgcacagaccgagcaccacgcgctccccggccagcagctgtttatggcggcacggcgtcctgcgcacggccgtttttaccatgtcatacgttaagattctgccgatatgcgccgtaatctggtgtgacggctgcggggcggcgcatgcgttggcgatcagcatcggaatctgatgcttgcacaaatatgtatcaatatcgctccggcaggcgtccgtcagcccgtttgcctcataaaaagccattttcgctgcatattgcttttgcagttcgtgatctaagcggggcttaaacggtgtttctgtaagactttgcggattttcccggtagatatacagcccttcgtctatcactttgacacgcgcggcttggcggaacgctgccaagttaaacggagagtcctcggcaaaccggatatcttcatggaacaacagcccttgcaatgcttctcgccggtatatatagcgccacacataccaaataaaccgatgttcgtgcgcgcgggtcagcaatgcggtcatttcatccgctgtgaagacgcggcccggcggaagggacggcggcatatacgttctttctttagacggcgtttctttgtaataaccgcagccggcgatatccagccggttcttctccgcttcttcataaagccgctcgaacattgtttccgtcacataatcatcgccgtccgcaaaaccgatataacggccgcgggcggcttttattccggcattgcgggccgagctgaggccgccgttttctttatgaatcacccggattctcgcatcttctgcggcgaattgttcagccatccggcctgactgatccggtgaaccgtcattgacgaaaatgatttcgatgttcctcagcgtctgttttgttaaagaaaccgcgcattctttaataaaaggctctgtcttatacatcggcacgatcacgctcacaagcggcgcggtcattgggcatcaccgctgattttcgagcgcagcccggcaaaataaacacttcgcaaagaaccgccttcctcatgcttgccgctgagcagccgatttacggcggatgttacggcttcagggtcgggacgttcaagcaatgtcatgttcggtatgtttttcagccattgatagccttccatcaccttatgatcaaacgaacgaatgacgacacaaggcgttttcgtcagcgcacaaaaaatcatcccgtgaagcctgtcagtgacgacggcttccgcgcctttcagcgtattccaaagcgcttccagctccttttcgcgtgtatggcggctgaccctccggccgaccgtcgtggtaaaggaatacagctctccgtactctttggccaaagcttcttttaccatcgttctgtcctcagccgtcagcgcgctctccttatcctcccgtaaacagaggtagatcccttcccgcgctatgccccgctcgcttttatccaaatataagaccatgtcaggctgtttgagcactgtttttccgggaaaatgacgcttcatccattgatacgtcgtctcatctctcgccatcaacaaaaggtcgggatgcgcattgtacacttttcgggcgcgcttcagttccttccgtcccttttttgattcagaaaagtgagccgtcgccggaagctgaacgatccgatattgccggaatgtttttatgataaagcggcgcgtccattcctcataccggtacaaatcccccatgttcccgccgccgatgatgaataccatatcatcggggtggcgctttttgatcagcacttttgccgatctgtatatatccttcatatccacctcgacaatgtcaaaatcgggatactcccgttcaagaaacgttttgcttgcgtaggcgatggcgtgatcgccgagattatcgtgggacgggagcagcgtcagaatgatcttttttcttgccgctgtaagccccgccgccccatccgctcccgttccgaaatgaaattgggacgggtatttgaccttaagcaaaagccattccgcgagattgatttttaaagattgtatcgacatgtcttcaccctctgattttcattttgtactcgattgcccgctgatacgcggctgatgccagcgacacgaacggaatcagcttcagcttcgccaaaagcagaaggcatgagcgtttggcgtcaaacggcgccgttcccgttttggaaaggctcatgcggaatacgggatcagcgcatatccggctgatattcttccacttctcagaaaaccggccgccgttattccgcttccattcattcagcaggcagactgttccgtgctgaacgatgaaaaaatccagctcctgccggtattcgtgtaagcagccgttttcacgcaaaaaagcctcgttcagccgatagagaacgagacctgagtcaaacagctttttctgatagctttgcacaatggaagtcaagtgaatccgataatgatagagcggctgatccacgtacgagaccgcacctgcgaaaacatgcgccctgaggctgaaatactgatcctccacgtgctccagctcatcacgaagcggaaagcgcagctgatgatgctcgatcatggatcttttgtacagcttgttccatgaaaagccgctgactcttccttcaaataaatctttcaggtaccgttgtttcgggcggccctcgtacgctgaagcgatcgttgaaacggcggtcttccccgtatccgcaaattcagccgcatattcgcaaatcacgagatcagcctgatcagccttcgctttttcatacatgcgcaggcaataatcaggttcaacccagtcgtccgcatcaataaaagcgataaattcgccgcgcgccgcctcgatgcccttgttgcggaccgcgccgagcccccggttttgctgatgaacgaccctgattctctcatcccgcttctgataggtttcaagaatcgccgggctttgatccgttgacccgtcattaacggccacgatttcgatattggcgagcgactgattgagcaatgaatctaagcatctttctaaataagtttccgtattatacacagcaattaataaactgaccgcgggtgtttccatataaacctccagtgtccattaccgggaaaaaatcgttctgtacggaagcacagacgaatcgaccggcataagcaagtaactgtaaagaaaataacagacaataatggcgatataaatcagcgcatttgatttttcatcaaaaatcctcacaaaataagggatcaggatcatttggtacaggccgaaatatatattaaaccgggcaaaaataacatcctttgtcgccaaaagaccgaagagcaggccgagcagacagaaattcacgatgacatcaatgtcaggccagagcttccgcagccgctcccggtagcagaaagccaaaaacagcggcagcagcagcaccgcgattttcacgacgttcatcccgttcgtattcgtcatcagccatttctcataatggccgtacgagctgttttccagcacgacgacaaacagcgaaatgaacttctgatacagaaacgtcataagaagaaacaatgccgacagtccgaaaatcgcgggcgaccaggctctttttctgacgagaaaataaaccggaatcataatcagcgctgaggaatgaaaaagcgaacacagcagcacgattgacatataacgcttccagcttccgctgatcacgtagcggacggcccaaaacaaaacggccgccaccatatactgcctgatcccgttaaaggaagcgtaatagtgatacgtgcccaaaaacaaaaatacactcagctcaaacggacggccgaactcaacgagcccctttaaaataaagctgcatgtcacgaccgccacggtgaaatacatgatttgcggatctttcgtgataaaattcatgagccagatgagagccgtaaaccccggatcaacggctgcttttttcgctccgaacccgaagatctcccaaatgctgccgtaatttcccgccagcttgtacattagcgcgtacgtctgaaaatccgtcccgactctgtagcgcaaaccggagaccaataccagcgatagcagcggaacgagcatgacgagctgattcggccggtatccggtcgaaagcgattgatcacgcccgccgcacattttcgcgaaccatgaccaaatataaacaattcccatattgactacatatacaatcattcgttactgttcctttttccaattcatattgtaaagcttcataacagcccccgcattttctcccgcgtcatatcccagccgcctgagggtttctttaatacgcgccccgtcaggctttgccgcctctgctgcccgtaaaaccgcggatgcccattgtcccggcggttctttgaggctgagccttttgaccagcccgagcccggcatcggcttcttccgttatgccgtctgatatcacgcacggcaccccggaggcctgcgcttcaacgagcgtgacgggcagcccttcataaagagacggcatgacaaatacatccagcgttttcagcagatcatgaacgcggtcttctatgccgataaaacgcacatcatcatcaagccccagcttcgccgccagattttccatatcggtgcgaagcggaccgtctccggcgagaatcagctgtaagccgatgccccgctctttcatatcagcggccagccggagcagaaattcgtggtttttttcttctgtaaagcggccgatatggccgatcaccaaacggccgtctgcaatgccccgcttccttttttcagcttctgtgtccgcgcacccgccggcaaataagtcgagatcaatgccgttcggcaaaagatgcacgtctttttctttcccgaataagaaacggcccgcctcttttccgcaggcgcacagtgccgtggcgtttgccgtgatcagccgtctgaaaacaaacagctgcatcccggcaagccgcgacgcccgccccgccacgacgtactgtgcgaatggcagatccgcaccgggacgccggctaaacgagcggcaagcgcgataaatcccgactgaaaatcggtatgggcgtgcacggcggcaaacgggcctttttcctgaatcacccgcttgacctgtttaacaaatgtaatcgggtttgtgctgccgatgctcggcacataaaaaagccgtccgccgagagcgagaatttcctcgtcataagcgcacggatcgttcctatgggttaaaaaatcaaactgcaccttcgttctgtccatcttccggtacaaattcatcatcatcgtttctgcgccgcccctgttcatcccgctgaagatgtgcagcacccgcatcggtttgtcagtcatgttcggcaagcccttctttttggcggatgtccctgtttttatgataacggttcatgaccgcgggcggcgtaatggcgcggatgagcggttttgcgatatacgcgtaatgggaaatcggcagcttcagccgtctgcatgcctgaaaaacgagcaccgcattatcaatggaatacgtaaacgatctccttttgaacgcatcactgtcctctcttactttatacagcgtttcctggagattgtaccctcggaaacccgcttcaaaaaagcgcagccacaaatcgatatcctccatccgccgcgtccgcctgactgaccggtagcctccaagcgctttgtacgcttcagcccgcatcataatggtgccgtggcagaacggtgtgcctttcgccataattcccggtttcggcacgggcggcaaaagccgggcgcccctgacgccgaattcatcaaatacgagcatccccgtgcccacgacttgatagtgggcgtgcttgtttaagaaagcggcctgtttttccagtctcctcgggttggagatgtcatcaccgtcctgcctggcgatataatcccccgttgcgtatgtcagacagcggttcagcgaagcggcaagccgttgattcgtcttattttgaatcagcgtgatccggtcgctgtaatgatccgcgtaacggcgcgcaatctgatacgttccgtcagttgacgcgtcatcacacataatcagttcccaattcttatacgattggctcaggatggattcaatactctccgctaaagtctcttcgcaattataaattcccatgataacggaaattttcggttgtgctcctgcattcatacgcttttctcctttttatccatataaccggcgtaaatgtgcgccatttcctttaccgtacgtgtttctgaaaaaaattccgccgtcctgcgcccttcttgtcccattgcttttcgcagacccggggatcggtacagcttttcaatccgatcggcaaatgccgcgctgtcccctgccggcacgagaaaaccgttcacaccgtcttcgatgatctcacggtgccccctgttgtctgcggcaacggcgggcttttcggcagccatcccctcaagcagattcatgccgagcccttcgcggatgcttgaggcgacggacagatcggcaagctgaatcagctcatgaatgtcacggcaaaaaccgtaaaaccgcacaatgtcggataccccgagtgattcagccttttttctgtacggctcttccatcgcgccttctccggcaaatacgagtttcagctccggaatgcggttcttcagcagtgccgcagcctcaatgagaagtccctggtttttattgccgtttaattcagcggggtatatgaggataaattccccggcgccgaagccgtgtttttctctcagacgttcactctctgcccggctcacagggcgaaacctgtctgtattcacgccgatgccgtgtattttcttcgcgccgcaagctgtttttttcatttgcttggcccgttcgtaatcctcttcattaatcgtaatcaaacaatccgtgtaagaagagagaaatttttcgatcgggtaataaagaagccaatttttcaggggcgctccatcgcagaagtgaaagccgtgcgcggtgtacagcacctttgtccctttttggcgcgcttgtctcgccgcaaggcgtgcaagcacgccgccgaccggcgtatgacagtgaatcatgtcgtagccgttagcctgaatgagccgtttcagccgcctgtaaacagaaagattttcgggatgaaacggcgagcgccggatcggaatggaaaacttttcatcaacgaatggaagattcatattgccgcctgccgcgacgtgcacctcccagcccatatcctgaaaccattgaaaatacggaagatgaaaggctttaaaatgataatcgacagtggcgcagaataatacttttttcgtcatctttctgtcctcccatcacacacctgcggccgcttcttcatgtactgattcgatcgcctcaaacagccgttttctcagctcatcttcaggcagacggctgaattcctccataaaacggatgagcacggcccaatccccgtcgatcgctttcccgatatggattttcggaaaaatctgttccgtatgtacttcattatgattcagcagttcttcatacatcttttctcccgggcggatgccggagaattcaataggaatctgttctgtcgtatagcctgataaatgaatcaggttttttgccaagtcgacgattttgacgggttctcccatatccagaacgaaaatctgccgcccttttgcaagcgcccccgcctgaatgacgagtcttgacgcttcggggatcgtcataaaatatcttgtcatcgccggatgcgtgacggtgacgggtccgcctttttcaatctgctttttgaaaatcggaatgacgctgccgcggcttccgagcacattcccgaaacggacggcggcgaatttggtgttgctgacctttccgaggttcatgatgaccatttccgcaaaccgcttcgtcgcgcccatgacattggccggattgaccgctttgtcagaagaaatcagcacgaatgtttccgttccgcacatatcggcggcttcggcgacatttttcgtgccgataatattgtttttgacggcttcttccggattatgttccattaacggcacatgtttatgggcggccgcatgatagacgacgtgcggctcgtattttttcatcaacgtaaagattttatctctgtcctgaatatcggcgatctccgcgtgaaaaagcacctctttgccgaagcgtgcggacagttcgttatgcaccgaataaatgctgttctccccgtggccgagaaggacgatttcatgcggaagaaacgagctgatctggcggcagatttcagaaccgatagagccgccggcgcccgtgaccagaatcgttttccctttgatgctgtcagaaattttgctcgtatcaagggtgaccggctttctgccgaggagatcttcggctttcacatccctgatgtgtccggcagcctgcgttccgagcaggatctcatcaaattgcggcatgattttaatatgggcgcccgtctgcacacattctttgtacagcgtctggagctcatgggtgcaaagagacggaatggcgatgatgatgtggtgaattctcagcctttgcaccgccggcataatgctttcttttccgccgatgacgggcaggcccatgattttgagcttatgcttcgtctgatcatcatcaataaaagccacaggcatgattccgagatcatttttctgcgtaagctgacggacgagcagcgttcctcccgcgcctgcgccgatgatcagcgcccgggaagagtcattttgcttcctgccgatcgtttctttcagcacgcgcgaaatcatccggcttcctccgatgaacaatagctgaaccatccagctgacggctaacagccggaacaaaatcgtgtggaacaccccgtattggacggcggctgtgacagctgcggacagcgtgatccccttcagcagatcaagcagctcgccaattcccgtatacgtccatacctgcttatactggtgaaacataaaagcgcatacatgatggctgatcagcatggtcacggcggtcagcagcaacgctccggagtcataaaagtgataagaatcctcaaaaaattgatatcctataacaacggaaagtaaaacgagatacgtatccaatgcaaaaatcattgaaagtcttctccggtaagtcaatctttcccctcctcatttatcggtttagctgatacggttttcgtaaaaacagacataacagctaagccgataacaatgcatcatcttaagataaattgggcatttaacccgtcctcacaccccgccaccgacgaccagcatctaaggcggcggaaaacgccgcccacagcagagccgagtgcctccgttgataaaggtaaggagacatcacctgcaccgctcaatacgagtagtgctctgtttttttgattttctttttattcagcagcgcccccaaaagctttgcctttgactgctggagcgcgtctttcgccttttggacggtatccattttcgtttttccgctcaagacgacgagaacgcttccatctgtctggttcgctaaaatctggccgtccgccaccgccaaaagcggaggtgaatcgaaaataaccagactgtaccggctgtacatctcctgaatcagctctcccatcgcctttgaagataaaagctcggccggattcggcggcgtcggcccgctcgttaagacgtaaaggttatcaatcagcgttttttgcaccgtttcgccgagggaagcgtttccgactaacacattcgtaaggccttgtacattttcaagctgataggtctcgtgtatcgtcggttttcgtaaatcggcatcgacaagcagcacctttttttcctgctgcgcaaataccgcggcaaggttggcggcgctgaatgactttccttctcccggaacggaggaagtgacgagaatagagcgcaaatgggtctgaacagaggagaactcaatatttgtccgaatggtgcgatattgttcagccaccaatgatttgtgatgtaaaacggatatttgagccagtccccttcttgatttcttttttctgaatcccaaacgcctcactccccgaaatgtttttcatcagaccgtgtctgctgatttttgatgtcatacacaacccctaaaacaggcaagtctgttttttcgctgagctgccgctcgcttttaacggtttcatcaagaaagtggagaaaaaacgcaagcgtcacacccgccatgagagccgcaccgaacgccatcatgatattcctgatgcgcgaaggcttgaccatcgggctttccgatgcttttgcctcggacaaaacaatgacgccttttatattcatcctgtcacggacttcttttttaaatgtcttcatcagcgtgttcgctatagcggcggcctgtttcgggttctcgtcctgcaccgctgcgttaatgatctctgaatcggtttcgctgcttgtcgtgatctttgcttttaaagcggatgccgtctcagaaagatgcagcttctgtttcactttctcaagcacaaccgggcttttcattatcgtttgaaacgtattgttgtaatgaagattcagctgaacgtcgctgagattcgaatttttttcaccgcttgtttcatgaatgagcacttgggtcgatgcctgataaacgggcgaaatcacccggaattggatgtatcccgtcatcagcgttacaactgctgtcatgataaaaatcagtaaaaatctgtgtttaataatgtcaaataactctttaaaactcatattctcattcatgtaattacagcctcatccttattgcatcaggcttaaacgcccccttctgttaatgattggattataaaagaaaaggtcgaaatttgaaaatttcaaattaagccatttagttctttttagagaacattatcatgattttcctcttatttactgcacttcccttataattttaaattttataaagaacgaaaaatttcttataatgaacaaaaaaatgccagtatacaggggagaattcagcacaatgattggaagaataattcgtttataccgcagaagaaaaggctactctattaatcagctagcagttgaagcaggtgtctctaaatcttatttaagcaagatagaacggggggttcactcaaatccgtccatccaatttctgaaaaaagtatccgccaccctgcaggtcgatctgacggagctttttgatgccgaaacgatgctgcatcacatgggaggcacggaagatgagtggcgcatccaccttgtgcaggccgtgcagtcgggcatgccgaaagaagaactgttcacctttacgaacaaactgactgaaaagcgcccggagcccgcatcctaccgtaacagaaaactgactgaatccaacattgaagaatggaaagcgctgatgcaggaagcaaaagaactcggcttgtccgttcaggaagtcagatcatttttagaacggaagcgttactgatgatatgctgatgaaagggcttttattcgcttcatgccttcatctctgtttataatgaaaagaaaaaaggggatgaaatcatgacaaaacttaccgttcaaacccgctgcggcgcactgaaaggaactgccggccgcggtgcccgcacatggaagggcataccgtacgcgaagccgcccgtcggagagctgagatttaaagcgccggagccgcccgcaccttgggacggcataaaacatgccgattcgttcgggccgatttgtccgcagccggatgatatgctgtccatatcgttttccggagatataccgcctcaatctgaagattgcctttacctcaacgttttcgcccccgattcagagggcgaaaaaaagcctgtcatggtatggatacacggcggggcattttatttaggtgccggaagcgaaccgctttacgacggatctgcccttgccgctgacggagatgtcattgtcgtgacactcaattacaggctcggaccgttaggctttttacatttgtcttctattcatgacgcgtattccgccaatatcgggctgctcgatcagatcgccgcgctgcgctgggtgagggacaatatctccgaatttggaggagacccggataacgtcacgatatttggtgaatcggcaggcggcatgagcatcgctgcgcttatggcaatgcctgacgcaaaaggcctgtttcataaagccattttagaaagcggcgcctctcatacgatgccggcggatatggcaaaagacatcgcggcggcatttattcatgaagccggcactgatcaattgcaggagctttccgttaatgacctgcttaagactgcggataaagtgcggcgctcactggatcaaaacatttttcagcttttgtttcagcccgccatcgatccggccacattgcctgcggaaccggtgaaagccatagcagacggggccgcagaaggcatacctatgatcatcggaaccaatcgtgatgaagcatatttgtttttcacccctgatacagacattcactccgagaaaaagcagcaagattatttgcattatcacctcggagaaaactgcaccgagcaagcggcagatttatatccgcattcattaaagggacaaatcgatatgatgacggatctgattttctggcggccggctgtcgctttcgcacaaggacagtcgcaacacgcaccggtctggatgtaccgctttgattggcatggcgaaacaccgccgtttcataaagccgttcacgctctggaattgccgtttgtgttcggaaactttgattctttgagaaagacgctgcaagagccgctcggtgatgacgcagaacagctttccaaacaaattcaatccgcatggctcgcttttgcaaaaaccggaaacccgaacacctctcacttcaattggcctgaatatgaaaccgattcacgcgaaactttgcttttcaacacggataccgctgtcgaaagtgatcccgattcagcaaaacgccgcatcctgtttcaagcataaaaaacgccaagggagccggctcccttggcgtttcattttcatcttacagacatcagtcagcttcgcagcatatccatttccgcattacccctgatatgttatattccaacccaatacgttaaccaaacattcataaaggagtttctatatggagaaatcaagtattatcggcacagctgccgttataatcggggcgcttattatcttagtttcatttatcttcctgcgcgacactgatttctatgccgtgaggtggataggggttgttatcatggttgcaggattttcatgcggtccggcccacaccatttcaaaacataaaaacaaacatgaaaaagaaacccggtaacctttactgggtttcgttcatacatttcattttatctcacttcataatgcaactccgcaaattgtttgtaacgcctgacatcagtcagcttcagtcctgtctcccggtctccgggtttaaacaaagaaattccgcggccgagcagaacgggggcgatctgaatgataaactcatcgacaagtttttcctccaaaaccgggtgcagcagatcactcccgccgacaatccaaatccgcttgccttcttggcgtttcaatgcatttataaaatcggcaggctcttcatgaataaaccgcacatgttcagtacgcccggtcaatgtccgcgaaaacacatagcattctttacctttgtacggaaattcctcaggcaataaaaccaatatttcctcgtatgtttttctgcccataatgatcgtatcgacagattcatagaaagcttcataatcggtgctgtcttcaccttcagttccgattaaccaatctaaagaatgattttcccgcgcaagatagccatctgcgctgacagctccgtaaaaaacgagctttctttgaccgctcataaaaatccctcccccttttttattataccttaaacatgcgggtgaaatgaaaaatgatagaatcgggtaaaaaccgccgttaccgggttttcgttttttcctgctttggagatgctgttaatatgccgtctatccatcttccggtaatcggcataaagaaatgaaggaagatcccgcctaaacaaacggttaataacgttccgatgcctaccggaccttttagcatcaaggccagtatgaaaaatatgaagtaaatgaccgttcttgaaaaaaagatgcttctcccggttaaatcacggacaattagcgttaaccgatcaaccgggatcggtgcgaaatttgtgtgcagataggttgcggttcctatccctatcacaactaaaccgattgcaaaacagcccgcctttccgtaccatagttcaggcgttatgactcgatgcagaaaaaaaagccacatatcaatcccgattcccgttatgaacgccgtaatcatccctgaaaattccggtctttgcctttttaacattgaattacagcaaattaacaggaaagcgatgatgatttcccagcttcccacggtaagccctgcatggacggacaatcccacaataagcgcatcaaaaggcgatgttccaagatctgattgaatcgtgacagaaataccaaaggtcaagatcatgattcctaaaacataaaaaacatatttcactttatcgtcctcattttcttattttatgttgcaaatacaacaaaattacggtatgtttactatacggtattttcattgcaaatacaacaaaattcagctggtatgataaatgaagaaaggagctgtatgaccctgagtattaaattaaaaaagtgcagccttaacgatataacagagctccgggagataagcattgaaacattcaatgatacatttaaagatcaaaattcacctgaaaatatgaaagcttatttggaaaatgcattccgctctgaacagctgaaaaaggaattatccaatccgtcttctcaattctattttgtttattatcatcatgaccttgcggggtatgtaaaagtcaacatgaacgaagcacagtcagaaaaaatgggggaagattctcttgagattgagagaatttatataagaaaaagccatcagaaacacgggcttggcaaatatctgctgaatgaagctgtgaaaatcgcaacagcacacaataaaaagaacatctggctgggcgtatgggaaaaaaacgaaaatgcaatcgccttttatcaaaaaatggggtttgtccaaaccggagaacactctttttatatgggggatgataaacaagtcgactttatcatgaccaaaaccctctcgtaaaaggatacaaaaaacccggccaagctgccgggttttttctcttattttaattttcccgcacggatatcatcggtcattccttcgtatggcgcttctgaaatcaatgtttcgttattgattcccgcattgttaagatacgtaatatccgcaaactcgggaacgacatatttcgggtacgtttcatatttctcacgtgactctttcatcacgtcaatgtaatcattttggtagcacaccgtgatttccggatgctcatgcacccatttcgggaagaaaataattccgtgcatccgtttttcattcggcataaagtttaaggaaacgtctgtgcctgtcggttcagtccatgacactttgtatacgccttctgtcagcttgacgatattcacttcctggtcgcgcacccaacggccgcctaccattccgctatgaatccgatagtcgatcgtatgatcatttttaatatagatttcatactcccagccgttttcatacgtgtaaatcatatggcttccgataaagttttccatgttgactcactctccatcttattattgaatttcataaatatctaaccgaatgtcatccggcaatctgaccgcagccccgataaacagccggtcctgcagatgctgatatgcctcattgcttgtttcaaacacaggcacagtgcggaaatacacgtgctcgggatcaatgatgcgtttcactgactcataaatgacttttttaaagaaggttcattcaaggacgtatcacctcccgagacaatatgtttgtttaaacatgtaactatttacatgattaattgtaacgctgttaaaatggactgtcaaataatgagctgtttccggttatgttttacagtgttcaataaaaaagacaagggcggcacatgccgaaacccttgtctttttcattaagctcatctataaaaaaacgcagacgagcgtcttcttagtaatcacaatctttatctctgcattctttctttctcacagcatctatagtgtgtcccataatcttgtcatttgctttatcataaataccgtcaaatttatttgatgtatcatcgttgtaatagccaaatacctctatcccgcccattggatctgtttcatatttatctttaaatgtaacgttatgtatgccttcataattcgctttgataaatttctccattcgttcttgagcaatctttatctcttcagcctgaacatttttatcattcatactcttcattataaaacctccggctgctattaagataatgaagataataatatattttttcacagaatcatccgtcccatcagttatgatgaagctcgcggaatggaaaaatggtggtgacatccgatgcatttagggtcttaagatttttctttaatgtccgcagaggatcatataagcggcaatccagagtacttctttattccagcgtctttttagtattcacattctttttcctgacattcgggtttctcttctgcatcgactgacgaaactcctatttcatcattcgttttgtcataaagtccgaaaaattctttttccttattaccattcaagtaccccttcaaggaaataccacccataggatttattttataattgttaatgtatgtaatccgctttatatttttgtaattagcttttatataactttccattttatttttcgcttggataaaaagttcttgttctgcttctttttaatcatggtggtacttcatgtagatacttcctgacgctatagttatcacaaatattagggcaattttgcatctcttcacaaactcatcctttcttagattaaatttatatcaacctcggggtgttgtacatgtctaaaaaacatcaacgtatcaagtatcagtgatcgagaatacttttttataagcgttagttatagttagatctaggttaaatgaagtgatgaaggagaaaggaattcaaatccagaaggaattggctgatttagttggttctactgaggctgcgataagcagatttaaaacaaatacaagatatgatatcacaacactattcattattaactgaggattaaatgtacctatggaagatttgttttatgtcgaggagatagagtaagagcaataaaacaaaattagctcagctcgattgagctggctaatttatcttgtacaaagcttatctttacattcttctttgggttcggcatcaaccgtatatgataatatttctttattgcctggatcatatagaccttcaaactctttttttccattcgtataacccttaatactaataccacccattggattaatatggtaatcatcggaaaaatggatattatccacatttttatagttcattgttaaaaacttttccatatgattctgggcttcttcgaataacgcaatctctttttccttctgatcatactgatgcttcataaaaagtcccccaactgctataattattaaaataaggataattatgtactttttctttttcatttggaaatcaaacccttcctataaataactgtcgttcttaagtaaacgaaatgagcgaaaacttgatatgaatatactttcagcatgtcaaaagcaaagctaaccaattcagaattcatcgcgattgttgctgacaagttaagattggaacttaaagcgagtaaaatgctgatctgacgttttcctgtcgttgagttgtcatgatatttgtacgcgtttaccgttaatatcggggatacctcgacaaatgagacggtagaggcgattgatctcaggaataggtttgaactgtatgagaaacatatcacgaattttgtaagataattaaacaaaataaatacccactcatcctgaggtgggtattttacctttcttcggcattgaccactgaaatacctatctccttgttcgttggatcatatataccggaaaattctttttctttattattatttatgtagcctgaaacttcaactccgcctgtcggatcgatattgtagtcttttgaaaagtgaacttcctgtacatttttatagtctttttttaagtaattcctcatatgatcttgcgcctcaatcacaagtttttcttcgtttttatgtttatcatattgatgcttcacgaaaaaacctcccactgctataattataacaattaggataataatgtattttctcatgcgtatcatcctttcggaactattttacaatataagaaaggtgatgtatatatgccaaaaggaaaagaaataaccgtctctgatgtcacagataaagaatattaccgtttgagtcaagcagcttacaattataaaatgttagccctgcatatgaaatataaaactccttataaaataagtaagacgtcatattggtacgttgagaaagtgaagcaggattctgatacgggtcttgatgcctttgtattctcaaaaggcatcaagtccaaaaacggaaaatggataaaatcaaaaaaccccgaaaacgtggtcgtcgcttttgcgggaaccgatatcggaaaagacccgatcaatgacggcgtaaaagcggacggcggcaatattgttttcggtaatgatccgcaaaaagaagtgtattatattgtaaaaaaagacgcggaggatacctcgaaaacactcggaaaatataatggaacgccctctcaagacgccatgctcacaaccggaaagtataagctgataacgaaaacatcgcaaatcgatcaagccgatcagctggtacgcagcgtaaagaaaaagtatgccggaacatcaacgattatttcaacaaccggccattcactcggcggcgctgaggccgaatacagcgcggtgaataatgatgtgtacgccgtcgcgtttaacagcccttccgtcgtgaaactgcacgatgaggaaacacagaaagacatcaacagcggcatatacgatccttacatccggtcaattatcaatccggacgacatggtcggggcgggttattggaacgaatatgaccgccacaacgggacaacgatttatacgaaaaacccctcactctcacagttcagccggaagcagcggcttgatgggaacttgaacgagcagatcggcaaaaatctcgcttatttctttactaccgtcattctgagaaatccggatacacacggcttaaatgaagcgaatttcatatttgaccgaaacggaaacatcacaaatccgaacggagatgagttagtcttcgataaaaatctcggcgctcttctgccggccggtgcgatcggaagcggagacgcgataaaagtaacgccgaaaaacgcaaagaagctggctgaaaaggtgcaggccatgactgaggatttgcggacgatgaaaaaagaagcgcagaacgcctatcaggagcacgatgaaaaaatcgccgagctgaaaacggaattttacggccaagtcggacacggcttgtttgatcagcttcaagcacaggacgtgaccaatacaattgaagatattgcgcaatcctacgataaaggaccgattttttacgacacacaggctgagcaggcgtttattgattctttgcaggcggcgatcacggaccttgaagagatcggcggattcttacataaaatagcggacgaatttcaggaaaaagaccagatgctcgcaaactggttaagatgatagaggtggatacataatgccgacattagacgaacttttagaacacaaggacgacccgatgaagaaaaggctgcagcggcagatgctgaaaaccgccatgacgcaggcagcggggacaaaactggaaacagtgcgccaaacgctgaaaccgacattcgaaatggacacattgaaagatgaattatatgaagtgtattcagcactattgaacagctttgaaggcaaggcgcaaaaagctcttgcgcagcggatcagtgaaagtgcgcggctgattgccggcaccgaacataacagagacacattcattaacagtttcaaaacaagataaaataaaaacctcgcagatttatcatctgcgaggtttttcctatcgtcttaactgagacgcgctcggagggattcgaacccccgacagacgtggtaccggaaaccaccgctctatccaactgagctacgagcgcacgttttttcaatcagatacctttatattataataaagaaacgcacagaaagcaactcttttttgattatacacaacaggattatgctgcacgaggacgctgcataatcctgcatcgtttaacggcattgattttcacaaaaaatgtatttcaggcggactgccctcggctcggtacatttccagccgcttcagaaaaagcgataatcacccgtttcagctttttttccaaatgtcctttaacgtccaataggtgaattcctcaacctttacggcgcctttctcagaaaacagctcaatccccaatctgccttcattcggatagatacggcttgtcatcgttgtttctccatgattggcgaatacttcaatcgaggatctgtcaataaagatacgcagcgccagcttgccgtttgcatccagccgcacccttctcacaccgtctttccccatcttggtgcaatcaagtgtcagctttttatccgttagattgtatgtcagcacaagttcttcttcgtcaaggccgcgaatcttaaaacctgccgtttcggcatcagaatcgtttacatcaaacacggctcggacttcaagcaggtcttcgggcgtctttgccaagtaactccctgaaaccgatcgtccggcacattcccgatattccattttccgcagctgcttggtttcttccacgggattcatcaaaagtttatgatcatcacgcaaagtcagttcccgcggcaaagtcagtgcaccgcaccatccgtccgcttttgtcggcatctcagattcccacatatccatccagccgatggcaattctgcgtcctttatcatctaataatgtttgcacggcgtaaaagtcatggccgtgatccagttctttaaaagcgccgtgtgtaaatttgtttgtttcattattatagtcaccgattaaatagccggtttgatgtaaattgttatatgaatcgccgtccgcctcgataccctggggcgaaatcagcaggacatgtttgccgcctaattcaaagaaatcaggacattcccacatataaccgagattaccgtcactttgggcgagaacccccgcgtattcccaatcacgcaaatcaggtgaacggtataaaacgacccgtccgacgttttcttttgaagagttgccgatgaccatataccaaacatcgcgatgcttccatactttcggatcgcggaaatgacgggcgctgtcttccggcggttccgtaataacagggttttcctgaagcttttcaaacacggttccatcttggctgacagcgatattttgagtctgatagaataggtctttctcttgatcaattatattatgtcctgtatagataagggctaatcttccatgatcatcgaccgcgcttcccgaaaaacagccgctttgatcgaattcgtcccccggagctaaggcaaccggcaggtgctcccaatgaatgagatctttactttttacatgtccccaatgcatcggcccccaatgctcatcatacggatgatgctgaaaaaagacgtggtattctcctttaaactgaataagcccgttcggatcattgatccaattcgcccgcggcataatatgataccccaatcgatatctttgtttcactttaccctcggcttccttcaaagcttcttccgcctgctgaattctgtccatttgtaacatcctctctatccgattttttgcagacgctggacacgcctgctgttttgtttcgggcccaataaagtaaatatggagatgacggtaaaaccaaagacgacgaatcccatgatgagataggtttgacggaaccccgcactgtcatataatcctcccgcaagcggcgacagaatcgacgcgcctgcctgagatgcgaattgaaaaccgacgagataaaggacggacgacagacgcgtatcaaaattggcggccaaatatttaaaaacggcgatcagcataatcggcaattccagtgcgtggatgagtttcattgatgaaatgcctacaggctcaactgcaattccggacccgacgatgcggaaagccattaaaaaccccgctaaaatcaaactgtttttcgctccgaacttattgacgataaaaggcgcaagaaacatcatgccggcctccaaaaacacctggaatgaattcagatagccgaatacttggttacccatcgacactgaaggaaacaaagacgcatagtagatcgggaactgctgatcataaacgccgtaaatgcaagtcaccccgataatgtacatcataaaaaaccagaaatcttttaataaaaagagccgccccacatcttttaaccggaccgattccgctctgtttttctcatgatcggtcatttctattttcacggacatgataatggccgttaatatgacggctgaaacagacgcgatccagaagttgatattgggattgatattgaaaagctgccctgcaaaaaatgcagccgccgcccagcccagcgagccccacattcttgattttccatactcgaaatcatacttacggctgaccttttcaatgtacgtttcaatcgcgcctattcccgccaaaaaagcggctcccaaatataagcctccgacaacggcgccaagaaagacgttgtattgtaaaagcggcccatagacgtagatataaaacggacccgtgaatatgagaagacagctgatcataaacaatatctttttcttcagccccaatttgtcagagataaaaccgtaaagaggctgcatgcacagggcaaatacggcgtttacagaaaagataatgcctgtcgctgatccgtttaaattgatttcctgccctaaccaaatcgcaaataaagaatagctggaagaccaagtaaaaaagaaaaagaagaaataagcactcagtttccaatacagactttttgagcttttcatttgcaccgctcctttaataggaccttttaatagtcattttgagccgcatacttccttcttcatattcatcacatacatgcgagctccgagtaagcgcttactttccgccgctgcttgattctttcactttattgccgccagccatctctccatacccgtcacttcccttcactccgtaaataaagcgctttcaaaaagaattgtatgtcaaccggtttcatatgtcaatcggttgacatatgattttctgattattccaatcaaacaaaacgcaccctctttatatgaaaacagaaacatggaatgtccttgcacatgtcagcctgattctctaaaataagtgcgtgacggaaattgtaagccatttcagtatgcaggagggcacgggaatgaagcctaacattcatgatgttgcgaaaatagcgggagtttcatctacaaccgtttcgcgggtattaaataaccgcggctatatcagcgaaaaaacaaaagaaaaagtgtacaaggcgatggaagaaatcaattactttccaaacgatctggcccgctctttattccgaaaacgaaccaatttaataggacttatcatcccaaactccagcaacccgtttttcggcgaactcgcctttcatattgaaagcatttgtacgtccatgggctacaaactgctgctttgcaacagtttacatcgaaaggataaggaagaaaaatatttggagatgctgataagaaaccaagtggacggcgtgatcgccgtgacttataaccggggaattctcaattatcacaagcagaatctgccgattgtcgccattgatcattacttatcggacacgattcccgtcgtcggctcagacaactatgacggcggaaaaaaggcggctgaactgctgattgaaaaagggtgccggcacatcgtccatctcaacggcccgattgaactcgaaacaccggcaaacctcagaagaaaagcatacgaagacgtcatgcatgaacacggacggaagcctattacatatgaagtacccttttatcagcattaccatgatattatttcaacattattcgatgaacagcctgacaccgacggaatttttgccagcgatgatatcatggcggctgccgtgatgaccgaggctaaaaaacgggggaaagacctcccgaatcaattaaaagtgatcggttatgacggcactgaaaccgttcaatcggttctgccggacttgacaaccatccagcagccgatcgaattgatttccaaaacagccatcgagattttagcaaaagaaattgaaggcgaatttgatgatttgccgctggaaacgtatttgccggtacggcttttggaaggacggacaacgtagtcagaccgttcagccgtatgtaccgacgcgactgcggtctattttgagcgctccggccatatcattttctcaaggctccggcgctgatcatcctcattttcactttgctgtttgaactttttgttttatgggaaaaatggtgttagaagaaaaggttggcattttggtcagcgttttgtttgacctttattgaccaaaaatgtatcatgtaaatacatacttacctaaaaggtgaaggaggagcattatgaatttaatacctacagtcattgaacaaacgaaccgcggagaaagagcttatgacatttactcccgtcttttgaaggaccgtattatcatgcttggatctgcgattgatgacaacgttgcgaactccatcgtgtcacagcttttattccttgaagcggaagaccctgaaaaagatatttccatttacattaacagccctggcggatcaatcactgccggtatggcaatctatgatacaatgcagttcattaaaccgaaagtatccacgatctgcatcggtatggccgcttctatgggagcatttttacttgcagccggagaaaaaggcaaacgttacgcgcttcctaacagtgaagttatgattcaccagccgcttggcggagcgcaaggacaggcgacagaaattgaaatcgccgcaaaacgcattctcttgcttcgcgacaaattaaacaaagtgcttgctgaacgtaccggccagccgcttgaagtcattgagcgcgatacagaccgcgacaacttcaaatcagctgatgaagctttagaatacggcttaatcgataaagtgctgacacgcaatacggaagaccagaagtaatgcccaaaaaacctgcaagagatgatgtctcttgcaggtttttttatgctttattcccattcaaaaaagtaatgaatgctttgacgacagataattctaacgctgaagaatcatacatgagccaagtatcgcgtatcacaggttcattatttttataggatagcgccaatgtgtataattcatcagaaggctgaagacagatttccggcacaacagaataaccgaggccgtttttcaccatctctttacaggtttcctgcctgtctacctccattgcaatgaaaggcggttcagtaaattggttattccaccatttttgaatcaaacttttcaaagaagcatcagtttgataataaatcatcggcaatttgggaaggtcctcactgttgatttcagtttttgaaataaggtacagcctctcttcattcagcagttgtttttctccttgccaatcataattccccctcataatcccaaggtgtacccccgaatgatgaagcagatccatcaccttcgcactccatcccgtattgacgtggaattgaacagacggatactgatcagaaaaccgttttagaatcgccgggagcttatactgagcaaaattgcttgagactcctaatctgagaaccccgctgacttcatggctcatattgagcatatcatccttcactcttctgaactcctgcagcatctctttcgaataatcaaccagatgttcaccttctgaagtgaactccatccctttttttcttttataaaaaaggcgcactccgaattgtgcttccaggtttttgagccgataacttaacgccggctgtgtcatatataatcgctctgccgccttcgtcatatttttttcttcgaataatgtaatgagcacaatccaatccttttcatccatatgaaatcccccaaaatatttttctgctataaaattttctcctattataaaagttttttatttaactttataaaaattatatgttttacttataatccttatttatcatacgatatcttccaaagggaccggtacctttttatccacacaaaatgatgtaaggatgagacagcatggaaaaagttcctgtaaccgttatgagaggcggcaccagcaaaggcgtttttattcttcaaaaagacatgccagacgatacaaacctatggagcgattttcttttagacattatggggagccctgacgagagacaaattgacggtctcggcggcggccattctctcacaagcaaggcagccattattaagaaatccgccagaaaggatgcagatgttgagtatacgtttgctcaggtcagtctgactgacaaatttaccgacttcaaaggcaattgcggaaatatctcttctgccgtaggcccttatgctattgagaaagggctcgttcaagctgaagagccggttacaaaagtcagaattttaaatacaaacactcaaaaagtgatcgcagcagaagtcgaagtcagaaatggaacatttcattaccaggggactgctctattccgggggttccaggtacagcttctcctatttatctttcatttcaccaggctgaaggagcggtgaccggtaagctgtttcccaccggtcagcctattgatgttctcgataccccgtatggaaatatctcggtatcgattattgattacgccaatccgcttgtctttgtaaaagcagaggacacggggcttaccggcttagaacttccggatgaatataccccggatatattggaaaagctcgaaatgatccgatcgattgcagccgagaaatgcagattcgctccgagacatgaggctgctgcaaaatcaccggccgtaccaaaactgacattaatctcatctccagcggattatatcgatacaaaagggataaagagacacgcagaagagatggatcttgtcattcgtatgatgtccatgcaaaaaccgcatcaagctttagccattacaggggcggtatgtacgactgccggcatgctattgcaagatacaatattatctgaattttcattctccgggagaacgatccgattggggcatccaagcggtattttaaaaaccgaggcagatgttgatccggatggaacaacgattaaagtagtacgcacagcaagaaaaatctctgaaggctatgtgtttactaaacaaagttacagcatgaatacgctcaatcacattggttaataccgtcttcagacaagtcaaagataaacggaggaatacgagatgatcaatgtaaatgcgtctaatcgattaaacagactgcctttttcaagggcccatcaagcagtgctcgttatcctttcattcgcttacttttttgattttatcgatttaaatacgttttcatatgcggcgccttcacttttaaaggaatggaacatatccactcatactatcgcttttattacatctgtctcctatttcggaatgtttatcggcgcctctgccggaggatggttttcagaccgtttcggaaggaaaaaaggtttaattctggttgtcacctttttctcttccttctccctcctctcttctctggcttggaacccagaaatactcggtgtttttagattttttacgagtttaggtatcggcgccacaacgattgtggcgagtacgtatatcagcgaatttttcccatccgcaactaaaggcaaataccaggcaatctgtattacaatcggcatatgcggaattcctgcggccggctgggtggctaaattggtcgtgccgtccgcctcttacggctggcggtttgtctttctattcggcgcggtcggtattttttttccgctgatcgccagaaaactggaagaatcaccgaaatggctggacacgaaaggaaaaagcgaacaagcacaccgcattctgcttgaactggaggcaaaagcagaaaatgaaaagggtgaactgcctgaaccagctccggctctgcaaagcagacaaaccgctgtaaaatccgttccatatcggacgctgtttcaaaagcctttagcaggaagaacttttgttttaatgacgatgtgggcagcttccaccattgcaattcaaggctttggcacgtgggttcccacccttctggtgaaagaaggcgtatcaatggatgagtctatcgtatacgtcactctgggaacgatcggtgccccgctgggcgctctcattgcggcgcaaatctctgaccgtgtggatcgaaagtgggccatttctgttttatcgttaattattatggcgcttggattcttttacggcatcaatcctttgccgatggtcattatcgtatgcggatttctcatgcatatgtttgagcgtactttcagttcgatcgcatatgcttatacgccggaattatatccggttgaagccagggcatctggaaatggcctcacttacggcgtaggacgccttgcaaatgtagccggtccctttgtcgtcagtttcctgtattcaggctacggatttttaagtgttttcttattctttacaggctgctggtttctttgtgcactgacagtcggtatatttggaatcggttcaaaaaaacaaaagatgcagcaggatgatttcatatcggaagaaactttcgtgcaacaaaagttgtaaacgcatacagtctggaaaccgcaaaacatccatctcctctgaggaaatggatgttcttctttcaaccccaacagcagtctcattcgcctcttattctcagacatatctcttattacgaagaaaggcgtggtacgcatgagaaggagaaaagaactttccgtcagaatgaattagatgcagccgccgaaacatatttcagaccgctgccttacaattcacgccatttcttatctaaaatcgggtatgtataccgattcatctgctcaatcagctcatccggccgggaggaactatgtatcagctttaaatgagactcattcgaaaatccttcctggatgctgtacttgaccatcttcatcatcggctcaaaatacccgttcacattgtacagtccgatcggtttttgatgaatgccgatttgcgcccagcacagcacttcaaataactcttcatatgttccgaaaccgccgggcatggcaatgtacccgtcggcaagttcactcattttcgctttccgctcatgcatgccgctgacttcaatcagctccgtcagattctgatgaacaatctctccgctgaaaagcccgctcggcatgacgccgacagcttttccgccgcctgccattaacgcatcagcgacggttcccatcagaccgacccgtgaaccgccgtaaacaaggccgattccctgctccgccatatattcacccagttcggccgctttgcgtttgtactcttcatttacccccgggtttgaccccgcaaatacacaaatggttttcattttttcatctccgcatctatatatgtacatcaataaatcaaaatacactatatattgtcccatctctatatgataatatcaataagaatcatacaggacataaggagtgtttcacatgcagatggctgaagcagaacaatggacgaaagatttttacgaaaaacgaggatggacggcgtacgggccatttatcagaatcggctttttaatggaagaagcgggtgagctcgcccgggcggtaagagcatatgaaatcggcagagaccggccggatgaaaaggacgcaacccaggctgaacgcaggcaggagctgattgaagaaatgggtgacgtcctcggaaatctggctatccttgccgataagtacggaatcacgttagaagatgcgatgaaagcccatcaggaaaaactgatcaagcgctttgaaaccgaataaaaacacggcccgtccgctttttcatggacaggccgtatctgaatttatcccgttatctcgtcctgatgctcaaagaaatgctgtttcccgattttatgaaacagccccgtcttccggatcagctctctcggctgtgattgcaatccgacgatcatcaatctcccgttatgccgtttgatccggttcatcacattccccagcaccgcttctgcggaggtatccatgtaatgcacattattcatcagcagaataagcgtcttcggcttttcctgaagcctctccagcagcgatgattccagtgaatcaattgaaccgaaaaacagcggcccttcaatggaatatgtgctgacggacgaatcatttttaaccgatttgaccgcggcatgcggtgttttaatgcttgttgattcgctcatttttctgataaagaaaacaaaagcgagcacaagaccggcagaaacgccgataattaaatcaaacagaaccgtcagcaaaaaggttgccgccagtacgaatgaatcagtgtttttcagccgcatcatattggcgacttccctccgctcactcatgttccaagccacaaccatcaataccggcgccatgcttgccagcggtacgtgaacggcaagcggggcgaagacgagcaggacgaggaggacggtgactccgtggacaacaccggaaatcggagaaactgcgccgtttttaatatttgttgcggtccgcgcaatcgctcccgttgccggtatgccgccgaaaagcggcgctgccatattggcgatgccctgcccgacaagctccctattgctgtcatgccgtgatcctttcatattgtccgcgaccatcgccgataatatggattcaagtccgccgagaagcgcaatgatcagagccgagggaaacatcatcaccatgttatcaattgagaaatccggaagctggaaagccggaagctgccgcggaatttctccgtaagcagaaccgattgtcgccattttgtcaggaaaaaacacgaccgcagcggctgtagagacaagcagggccacaagcgcgccgggaatcttcggcatcagcctggctgataacagcaaaatggccaaagcaattcccgcgatgaggatgctgtacaaattaaaggttccgatcttcttgcctatttccgcaatgttgaggataaagctttcatgcttttggatatcgcgcagaccgagaaaatgggcaatctgctccgagaaaatcagcaccgcgatcccggccgtaaatccgacgatcaccggcttcggcacgaatttcataatctttccgagcttaaatacgccaaacaggacgagcatgacgcctgccataaaaccggctacaagtaaattctcaaaaccatactgcatcacaatggcaaataaaatgggaacaaacgcccctgtaggcccgccgatctgatatttagagccgcccaacagcgaaatcagaattccggccacaataacggtgtaaagcccgtattccggaccgacccccgaggcgatggcaaaggccatccccagtggaatcgctacaattccgaccacaattcccgcgattaggtctttctgaaatttctgcaaattgtatccctgatatctgccggtaaattgcatcgtcagctgcatcctcctttgactgtttcataaccgtcaacgactacatccagcgtccccgttcccggatcgatcaccagcccgtgcaccggcacctcttcaggcaagagcggatgatgcctgaccatattcacgctgtgggccacgctttcttcgacgctgtgaaaaccggtcagccatgtttccaaatcgactcccgcatgctgcagaaggctgagacatttgtcctccaccccgcgctcttttgctttatttaatatggaagccgcatttaatcccgacattccgcactcgcggtgacctatgatgcagacttcctctgcctgcagttcataaacggcaaccaaaatgctccgcatgacacttccaaatgggtgagaaacaatggctcccgcgttttttatgattttggcatcgccgtttctgagtcccatcgcctgcggcagaagctccgtcagccttgtatccatacaggatacgatgacaagcttttttttcgggaattttgtcgtttggtaaggttcatatttcctttcttggacaaactgctggttgtgctccaaaatgcttgataaagaaaccatttttctattcatctcccatccgattgtattgcaagccttcttacccagcttacagtaaggaattatagcacagaaaaaggcctcaaaagcgctttcaaaaaaagacacgataatttgactgtaaattcagattatattcatttatatctttcaaaaataataaaatttatctttacaccaacctataaagcttttgaaaacagcggttccgctcattttgccttcagaaatataggcggattctgttattgtttggagaaatcaagcatgtacattcctttttctttcattttaagttcaaaagaaccagaaatttatcgtaatgcgtttgattatttctcacgttaccgcttctcttatataataaaatagagaagaaagacaaaggaggagaagcccgttgaaaccctatgtattcatcgcgaaaccgataccgcccgaagtcgaacaaatgatagacgagcattgccgctatgacatctggaaagaagataccattccaaaagagaaactgtacgaaaaaatgaaagatgctgaagggctgctgacatccggaacggcgattgacagtgatttgctggatcacgcgccgaagctgaaggtcgtcagcaataattcagtcggctatgataattttaatattaaagaaatgaaaaggcgcggggttgtcggcacgcatacaccgtacaccttagatgacactgtcgctgatctggctttttcattaattctgtcttccgccagacgggttgccgaattggatcgattcgtccgcgccggcaaatggggaaccgttgaggaggaatctcttttcggtatggatgtccaccatcagacattaggaattatcggcatgggcagaatcggtgaacaagctgccaaacgggcaaaattcggcttcgatatggacgtgctgtattataaccgcagcagaaaaccggatgccgagaaggaactcggggttacatataccgacttagatacactgctgaaaacatcagactttgtgcttttaattaccccgcttactgacgaaacatatcatatgatgggagagagggaatttaaattgatgaaagatacggcatgtttcgtcaatatttcccggggaaagacagttgatgagaaagcgctcatccgcgcattgcaagagggctggataaaaggcgccggtttagatgtgtttgaaaaagagccgatcgccgaagataatccgctcctgcagctggaaaacgtcacattgcttccgcatatcgggtcagcaaccgcaaaaatccgcttgaatatgttcaagcaagccgcacagaacatgattgacgccgtatacggaaaaacaccgaaaaacctcacgaaggaatttcaatgagatgaaaaatcccggccgtttcagccggggtttatttttcgctagatcaaaagtactattttaaaattctttctattcctttctcttgatgctgatacaatgaaaaggaatcagcttcacatgataaaaatgggaggtattgctttgaaaaaacgattatcgtggatttccgtttgtttgctggtgctgttctccgcggcggggatgctgttttcaacggctgccaagacggatacatcttctcacaaggcgcacactgaagcacaggttatcaacacgtttgacggggttgcggattatcttcagacctatcacaagcttcctgataactacattacaaaatcagaagcacaggccctcggctgggtggcatcaaaggggaatctggcggacgtcgccccggggaaaagcatcggcggggacatcttctcaaacagggaaggcaaactccctgtaaaaagcggacggacgtggcgtgaagcggatattaactatacatcaggcttcagaaattcagaccggattctttactcaagcgactggctgatttataagacgacagaccactatcaaacctttacaaaaatgagataaacacatacaaaaaacggcttccctgcggaggccgtttttttgcagagaatctgcaagcttcatataaaatgagcagtaaatttttcttcaaactctgagcggtctattctgctgttttccgccgtgccatcgtgtttttttattgttatattgcgttcagacagaaccatgtgcccttccggtgtccgcttagaagcaagcaggcgtttgttgaaaggagaacgttcatgttcaaagattgtttgtttcatagacttgaggtccttttcatcgatttcttcaagcgaaaatgcgtagcctgtctgccagccgtcccctttgttcatttcaagcacgtatgtcccgaattccgtctcttctatcctcacgcggaacgctccggccgctgataccgtctcgtctcccgacatcggcacaggctgcatggcgagattgaggccgaagcctgcatcagcgatgtactcatttcccccggcggaaagaagtacggccgcatgtgtgccgggcagcgcccagccgtttttccagaccgttccgcggatcaatttgacatcaaatccggcatctttcaggatgaaataaagcagtccgttcaagtcataacaaagaccgccgtgaggttccttcaccatgtgccgccacagtccttctttcgtgacgtcatattcttttttggacaaaacggcgcggttttcaaacggaaaccgatacgcgagcgcctttaaaaactccggcaggttgctgaaatcgagggaatccttttcccagcctatcgtttgataacaatctttcagaaactcattcatcgttccgtccccttacaaagtgtttacacttcttcctgcacataagcggacaacttttccagcgcttccttttcatcgtcgccttcagcgatcagagtgacttccgtccccgtactgaccgccagactcattaatcccataatgcttttggcattcactttcttgccgtttttctcaagaaacacatctgatgcaaaacgatttgcctcctgtacaaacaatgcagcggggcgcgcctgcaatcccgtctttaaacgcacttccactttcccctgaaccataagatctccccttttctgtacggttatttcaaagtgatgctttgtcctgtacgcagctgttctgcgatttcatcgagctttctcagcctgtgattgatgccggatttgctgattttcccgcttgcaaccatttcccccagttctttcagcgtgacctcctgataatcaatccgcagctgcgcaatttcgcgaagcttttccggcagcgcttcaagaccgatccgttcatcaatgtatttaatattttccacctgtctgagagaagccccgatggttttgtttaagtttgctgtttcacaattgacgaggcggttcactgagtttctcatatctctgacaatccgcacatcttcaaagcgcagcagtgaattgtgagcgccgatgacattcagaaattcagtgattttttccgcctcttttaaatacgtaatatagccttttttccgttcaagcgttttgctgttcagatgaaaatcattcagcagggcgcataatgaatcgttatgttccttataaagcgagaagatttccaagtggtacgacgatgtttcgggattattcacagatcctcccgccaaaaacgcccctctcatataagaacgtttgcagcaccgtttcgccaccagttcctcagaaatattccgttcaaatacaaagttctccccgaggattttcaattcctctaaaatcagctttgcattttcagaaaagcgcacaatataaacattattttttttcagccgcattttttttctgactaacagttcgaccgatacatcatattgtttcttcagcaatgtataaatgcggcgggcaatcgccgcattttcggtttgaacgtcaagcacgagatggcggtttgaaaatgacagggaaccgttcatccgaatcagcgcggacagctccgccttggcgcagcagtccttcacttccagattcgtcagttctttttttgtttccgatgcaaatgacatattagccacctcatttcaaaaggcctctagtcccttaataaatcgacaagaagagaagccactttatgtgtatcgtgacggattacgccatttttatacgtgataatctgatccctgatgacctcaagccccatggatttcagcttttcaacattgaagtcgacgggccgggccagctctttcgcatatttgcttttgatttcgtcagggatctcctcattgttgattaagatcgtgtcgataaacggctgctccatatgatcgttcagcgccttgacatggtcggccgcgctgtattgaagcgtctcgccgggctgtgtcatgacgttgcatatatatacttttttggccgcggccttgacgacttcctctccgattttcggcacgagcagattcggaagaatgcttgtgtacaggcttcccggaccgataatgattaaatcggcctgacggatgacgtcaatcgtttccggcagcggatcaattttttcaggcgtaagaaacacccgtttaattcgctggccgtaagaagggattgtcgattctccggagacgacctgcccgtcctccatttcagcgtgaagaacgacactggtgttggcagccggcagcactctgccgcggacattcagcaccttgctcatttcggtgacagcgtgaaagaaatcaccggttatatttgtcatcgctgccaaaatcaaattgccgagcgaatgtccggttaagtcgcttcctttgttgaaacggtgctgaaacagattttcaacgagcggctcaacatctgacaaagcagccagtacgttacggatgtcacccggcggcggaatttgaagttcatcccgcagacggcctgaacttccgccgtcatcagcaactgtcacaatcgccgtaatatcaacgggcttatgctttaacccccgaagcagcacggacagacccgttccgccgccgaagattgcgattttcggcttcttattcatttccggcttctcttttcaatgtcccggtgagtgacatgagtatagaaatcttttttaaaatagtcagccaaatactcagcgagcgtgacggagcggtgctggccgcccgtacagccgatcgcgatgacaagctggcttttaccttcccgcttataagacggaagcataaagccgagcagatcaacaagcttttcaataaacttttgtgtttcgttccacttcatcacataggatgacacttcctcatctttccccgtaagcggcctcatgctttcaatgtagaatggattcggcagaaaccttacatcaaacacgaggtcggcatctatcggaagcccgtatttgaaaccgaatgacatcacgttcactgtaaatgtttcaccttggttcgtggcgaaatgcgccacgattttttcacgcagatcacgcggtttcatatccgatgtgtcatagatcagctgagagcgccctttcaattcttcaagcagctggcgttccagcgcgattccttcaagaggaagcccggtagcggccagcgggtgagaacgcctcgtttctttgtatctcgtcacaaggatggaatccttagcgtctaaaaagagaatgcgcggtgtaatccacggattttccgccatttcatccagcgcctcaatcagcctgtcaaaaaattcacgtccccgcagatccatgacaagcgcgaccttgctcatttttgaacttgattctttcatcagctccaaaaatttcggcagcaaggaaggcggcagattgtcgacgcaaaaatagccgagatcctcaaagctttgaatggcgacggttttccccgctccagacattcccgtaatgatgacgagctgaatatcatggttttcattcatactcatctttctcccccctgcggtctttcttttatttgataagctgcggatctaaacgatagctgagcagctcgaagtccggcgtatacgtaaaggtgccgtgcaaaagcccttggcccttgatcataaaatcaaggatatgcccgtctccgggggccatcggaaggctgtggatatcttttacgtcatgccacttcagaacgccttcctctgattcagcgacattccgccccgtgtaggagtcggcgacgaaagtaaacatcatccactctgacacgatttgttcctgttccttaataataaaggtaaacacgccttttaactgcggatttagtatataaatgcccgtctcttctctgtactctctgatgacggaatctctgacggattcgccgctttccatcttcccgccgggcgcgacccaccagccccgtctcggcttttggagaaggagaacctgatcatctgtctgcagcacacaatttgtcactctttgcacaagtacgtcacctaaccttctcaacaaatcatcgtctcttcattataccgtttcggcatgtctctcacaatgcagagacaccgacatccttttcttttatttgacagaaaacaaaaaatcgcaaaaaaagggcacggatactggaatccgtgccaaagtgtattcattaaaaagggggtcaattactacattcatcttaaaacatcagtatttcacccgtgttacagcgtaattaaaacacagtaacgattcaaaaactgaacattacagtgattatttaacggttttgagcgtttcctcaagctcttccacataatgctgaacgctttgagccgcaatacttccgtcgcctgtcgccgttacgatctggcggagcgttttttcacggatgtctcccgcggcgaaaatgcctgggacttttgtctccatttgggcatttgtttcaatgtagccttcttcatttgtgatgcccaagttttcgaacggtttagaaagcggaagcataccgatataaataaagacgccgtcagctttgaattcttcctcttctcccgtcacggtatccacaagagtaagtctgccgacttttccgttttcctcatggatttcttttacggttttgttccatttgaagtcaattttctcattgtcaaaggcacgcgcctgaagaatgctttgcgcacgcaatttgtcacgtctgtgaacgatggtgacttttgaagcgaagcgtgtcagatagacgccttcttcaacggcggagtctccgccgccgacaacgacaagctctttatttttaaagaacgcgccgtcacaaaccgcgcagtacgatacgccgcggccgcccagttctttttcgccgggaacgccgatctttttgtattccgctccggcagaaatgacgatggcgcgcgctttatattcttttgaaccggctttgaccgttttatattctttaccgtccacgatttctttaatatcgccgtacgcatattccgcaccgaattttttcgcatgttcaaacattttattagaaagttcagggccgagaatgctttcaaaacccggatagttttcaacatcctccgtgttggccatctggccgcccggaattcctctttcgatcattaatgtggataagttcgctcgtgatgtgtaaacagcagcggtcatccccgccggacccgcgccgataatgatcacatcataaattttttcttctgacaccatgattcactccttttcgaaatggggcgcaccctatatgactaagaatccccatcaatcgtattccttacccatatcctattaaatctgagggcaattcgctatttttttgctcatttttctgagaaaccgtgattagggagctcctgagcgggtatacaaataaagaaagagccttccgggatagaaggcccttgtcttattcattattgcacgacacgtcttacattgccgttgaatgctttcttccagtaagggttgctcatagaatcaatggatacaccgtgtgatgtattatcgttcaggaacgttccgttacctaagtagatgccgacgtggccgtttgttttatacgtgttgaagaatactaagtctccgcgtttcatgtcagacgcgcttactgctttacctcttccgattaatgtatctgtgtttgtgccgcttgcaggtccgagattaacgcctgcgttagcataagcccagcgtacgaatgaagagcagtcaaagatacggttgtcaatatcggattgagtgcgtccgccgccgaatttatacggagattgacccacaaggcttgatcctacgctgatcgcgccttcaataccgcctgaatttgaaataacagatccgccgtcagaatcatctgaaccgccgctgttatgagatgatccgcctgaagtgctcttcggtttgcttgagctgtcagatgaatcagatgatgttgaaacagccgcttttttcacagttttaaccgccggtgccggctggctgtcatctttttggttttggtcttcagaagctttttgcgcttcttcctgttttttgatcagggcagccgctgcagcctgctcagctttaatgcgcttctgctctttttcagtgtcagctttttggtttgcaagctgtgacgcttcttttttcagatcagagatagcggaagccgcttttttctgaccgtttttcgcttcgtcgaaaagcttgtctttctgatcaagctgtttgttcaggtctttttgcatagactcgagtttcgcaagatcatcttgaacttttttcagcttcacgttaagttcagcctctgcgtcttcgagtttcgctttatcctgctcctgctgtttgatcaggtctttatccgcatcaacgatagaagatactgcagtcgcacgggaaatgaagtctccgaagcttgtcgcccctaaaagtacatctatgtatccttgagaaccgccgttttcctgtaaagaacgaacgcgttttttcaggatttcattgcgtttttcaatacgcgcttctgtttctttgatttcttttttcaaatcagcgatctgctttttcgttttttcgttttcagcttttttatcttcgattttattgcttgtatccaacgctttagcgttaatgtctttcagttctttttcaatcttagcctgcttgtcctgaagcttggacaattctctttcttttgcttcaaggcttgaagccacctcagattgcttgctttcaattttcgcttttttgctgtctaatgtttccgccgatgcagtttttgtaaacgggatcaaaaaactgcttgtcccgatgacggaagccaaaccaagtgttaataaactctttttcactttttctttcctcccttttactttaaacctgttctcatttggaattctattatgaacatcaaagttacgctccctcacatgcccgtgaggctgatgatttttatgtacgattctttgaatctggttaattggtatagattatacagcacatgtaaaataaactaatctcttatgtacgagactcattataccatcatgtttcgacaatttttattacagttatatttcaatgtgattgcaaatctcatattttgcaaaataaacggtgattacggcctgatttcgattcaaaaagcaaaaaaatacgtatgaatacctcttttttcggcggtaaagttctgttttgcccctttataataaaaaaaagaaccgactctttatatagaaagaatcggttttattctaatatatcatctatttgtctgatgtatttcgaaagggttgccggggttataccgtaaacggcggccgtttcttttttcgtcgttttttcgccgtttgcttctttccatacgtatgcgatggctgcggcccatgcccgctcattctgtacggcagcggcggcgcggatgtgctgaatgacgtgaaaaacccagcagctcatgacgtcagtttttaaactgtcggcttccgctttctccagaagcttgaccgtccgatacgtgaacagcgcgtcaccggagacgcctgaagcgcctttttcaccggaaagcagcagtctgacgaaatcttgttcaaacggtgaaacggcgcgttttgccgtcagaactttttcaagctggttccgctctccttcagcgctgctgatataataggcggcaagccgctgttcaagtgaagcaggcagcggttcctgccgctccgcccaaggcgcgggccggtctgattcgggaaattcggcttcggcctttttccaaatggtttccgcaaattctgtgcggcctgtcccgtaggctgaggcggcaagccagtaataaaacgtttcgtcgccttcgaacccgcttttgtaaagagaacggagccatttataaccgagatcatgtctgccgacaagcgcaagcgtcgcccccagcttatagcgctgttcgaataaaatcggatacacgttggcgagttttccgctcaattctccgactttttcatcttccctctcgtaatagcagaatacaaggaggttgcacagggcatggagattgccttcatttttctcaagcacttcgaataccgtctgtttcgcttttgtaacattgcctgagtaaaagtaagcgagcgccaggttgttgtatgcagaccaaagctcggggtaatcggccgtaatctcttcaagcatgacaaccgcttcatgaagctggccgctctcaagaagcgtttttgcccggtcctgcctgatcagcagctcatcctggtcatagagcgattcgttttcacccgcttcgccgaaatccaaaagctccatcagattttcaatctcttcgctgaattccccgtccggatcggcatctgaataagcctccgcttctttgtatgcttcctgaaagagccccaaatgcgcgaaattattcgctttaaaataatgacactcgggcatttcttctttcaggttcaccaaaataaagtcgaacagctcatttgactgctggtagtggcccatttcagaataaatgacggccagccgtgacagcatttcggaatcattcggctcgagatggacggcccgctgaatcagtttgctggcccgttttaaattccgctctttatatgcttttaagcctttatgaaaaaaatattgtccatcctgaagcagctggacaatttgcgcgtgctttttctgttcagaagtgtgttttcccacaaatatcctccgttttatacgtattaccgtcagtagtataccataaaacggtttcgcctcaatagttcaaaagacaggatcggcttcgttttttactggctggttcgaccagattttagctgtttttttcacgaggctcggctggaagaatgacgcggaaaagggttccttcgccgcgcttgctctcaacctctatcgaaccgccgtgcagctctgcgattttttgggcgatggacaggccgagcccgcttccccctgcgtttctcgccttatccgctttataaaaccgttcaaatacccgctccgcctgttcaggctccattccgattccgtcgtcggcgatttcgacagccgccgctcccggcagatcaacaattttaacggaaatgcggccgccttcaccggtaaatttcacggcattgtgaatcagattcatccatacttggctgagcagcgcttcatctccgtacacatacgactcctgtaaatcaatgagaaactcaatctgtttggcggaccattcaggctcacaggtcaatatggtgcgccgcagctgtttgtcaatgcggaacggttttttttgtatcggttcggtttggcgttcaagcgcagtgagcttcagcagattttcactgatttttgataatcgttctgtttctgtctcgatgatgtgtaaatagcgcccccgctcctcatatgataaatccggttttttcaggaggtgcgcgtagccctttaatgaagtaagcggggtttggatttcatgggaaacgttcgaaataaattcttgtttcagcttttccatttcactcagttccgcggcgagtgtcgacagttcatcagccaatttcgtcacggggtggtcccgttcaatcttctccattttcctggaggcggccgctgtgaagttgccgctcgacatttgcttgatcgtggcggtcagtgaatcccagatcgcatgatgtctttcacgtgctgactttgaaaagataaacatcgttataaacagcaggccgaaaacaagccagagcgtcagaatctgctcggcgtacggcacaagcaaaatcggccatatgagaccgaatccctgaacgatcagatgagccgccagccataagaatgcggtgacggtgagaaggatgatgatttttccagccgttctgaagatccgtttcattctgtcaccacaaaccgatacccgagcccccgcaccgtatggatagcaaacggatagtccttttccggaaaccgttccctcagccttttaacatgcacatcaaccgtccgctcgtcaccttcataatcaaagccccaaatatcttctattaattgttctcttgaaaacgtcttattcggataaccggcgagcttaaataaaagctcaaattcacgccggggcagcgtcaatcccgctccgccgccgcgcgttacggtgcgggattgcttatctaatgtgacatttccgatggtcagcagtttttcagcggtgatccggtaccgtttcagcaatgctttgacccttgcttccagttcaagcggctcaaacggtttgacgagataatcatccgctccggaagtaaaaccttgcactttgtccagcgtttcgccttttgccgtcagcatcaaaatcggaatgtccgtaaagctgcggacggcttcactgacttcaaacccgtccattttcggcatcatcacatccagtatgatgagatcaataggtgctgattcgatcagccgcaccgccgcttccccgtcttccgcttctgcgacgtcaaagccgctctgctccatcatgagtcggacaagctcacggatatggcggtcgtcatccgcaaccaatatgacagccataaaaatccctccttctgcttttttgcctgtcttcttttaatgaatcgacatgatgtctattaaccatcttattttttcattgtctcctgtatcgacagacactttttttgtatggcggatcatttcctccgtcacttctttcattacgccttgatcagtatcttcacgagactcccagcgcaaaggaacattgtatatctgaatggtgccgtcaccattgctgctgtaagtgactgacccatcgactaaccgggagcctgctaactgcgtaacatcttcgggatagcgggcgctcgtatgatcgtcagggttgacgagtgctccggccggaatgcggcgaacgttcaattcatctatctgctgattttccccaagctgcagccagatgcgggcatattcaatttgcagaggagaataatctgccgacaggcttttgtccgcagagatgtgatgtgaatctttgtttactggttcttttttttctgccgctgatgctgtttcagccttgttgatgccgctgctttctccggccggacttgaagaatggctcggctcttcatcgttaccgtccgtacacccggcagtcatgaatacgagcagtaaggccgcgtgccaataaaaaatctttgtgcgttttttcataatttaacccccgctttctatgaagagaactccggctgcaaaataaaaagcagctttttcagctgctttctattcataaagtcttgctttacacagctttgttttctaagtcggcattcagcttcagctgctgctccgcaaaatcgcggtacagcgaatgggatgccattaattcatggtgtgtgccccgtccggtgatttcaccctgttcgacaaagagaagctgatctgcatccacaaccgtggataaacgatgggcgatcacgatcgtggtgcggccttccattagaacttccagcgcctgctgcacccatttttcagattggctgtccagacttgatgtcgcttcatcaagcatcagaatgctcgggttgcgaaggagcgctctggcaatggcgatgcgctggcgctgtccgcctgacagcataattccccgctcaccgacctctgtttcaaatttcttcggtaagtcttcaataaattgcagggcgtaggccatgtcagccgcttgcctcagttcctcatcagtcacctcgcgttttaatccgtagcagatattgtcgcggatggtgcctgacattaacgggctttcttgcgacacgtagccgatatgctcccgccatgactcaagggaatacgcatcaatcggttcatttccgagcaggatgctgcccgcagtcgggttgtagaatcgttcaagcagcttaaataacgttgttttcccgccgccgctcggtccgacgatcgcggtgactttgccggcctcaatcgtagccgtaatgtcttttaagatggtttgatctgttttgtagccgaatgagacttgttcgagcttaatcggctgatccgcgttttcaatggcttttccgatttggatatcttcttctttttctgcaagaatatgaatcatccgttccgttgcgccgacggatttttgaagctgtgtgaaaaatgaagtgatctggcccatcggcataatgatctgaaacaaatacaggataaaggcaacgagtgcgccggctgtcaattcaccggatgacacctgcatcccgccgtacccgatgacagcgaccagcgccgccattaatacaagtgtaataagcgggcctacgagcgactgcaccttcgcttcacgcagcccgagtttaaagagcgccatgatgcctgcttttccgcgtccgtattccgcttcttcagcgtttgacgcttttacaagcctgatttccgggaggatgtggtttaataatccggtgaatctcgccgtttcatcctgtgtttcccgagaaattttaaacattttccggccgatcggcactaaaatcaccgcagccagcggcacgacgatcagcacgagcaatgtgagcttccagttcatgaaaaataagatcgtcagtgacccgataacggaaatgattccggtaataaatccgctgatattgtttgtgatcagctcttttaccaccattgtgtcattggtgacacggctgatcgtttctcccgtggcgtttttgtcaaaataagagacgggcagtttaattaatttctgccacaacaaatcacgcagtcccgagatgattttctggccgctgtagttcagggcgtaggtggcgtaggcgcttaatgcggcctgtacgatgaacacggctgcgatgattccgatttgcacgcctgacagcgacgacacggaaaagccgtcaacgagctgctttgtcaacagcggaatcagcaggctgacgagcgttgtcacaatactgagagacagcgcgaaggccagcataccgtatgatggttttgtttttttgactaatgaaaagaatgagctgaatttcccttttggttttggttgtttattcggcatatgttttcctcctatatcactgtttatactataacggatgtgcatgaacggaatatgaacaaaacgtatatttttgataaaaaccaaaataaactctattagtcaatattatcaaattcatctgcctacggttgcggaaataaggaatattttattgaatgtttaagtttgacagaataaaaacctcacgggtctctccgcgaggtttgttttactcagatgcagaatggcgtttcgcaaggacgtcaagcacgtcatccaaaggaagcgactgctcacgcagaagaacgagcaaatgatacagcaaatccgccgcttcccattttaattcttcatggtcgcggttttttgcggcgataataacctctgcggcttcctcaccgacttttttgaggattttatcgacgccttcccgaaacaggtacgttgtgtaggctccgtcaggcatctccgcctgccgtttggcgatcacgctttccagttcatttaagatgccgaaacgatcctgcgcgtctgctttttccgtggaaaaacagctgtagcttcccttatggcatgcgggtcctgagggctccgcaagcacgacgagggcatcttgatcgcaatcataacggatggctttcaccttttgggtattccccgatgtcgctcctttatgccacagctccccgcgtgaacggctgtaaaaccaggtttctttcgtttctatcgttttttcataggattctcggttcatataagccagtgtcagcacttctttgcttgccgcatcctgtatgatggcgggtatcagtccggcctcgtcaaaccgcagttcatctgcctgtttcatctcacattcaccccgtgtttcttcatataatctttcacttcttttatagatgtctctttgtaatggaaaatagaagctgcaagcgcggcgtccgcttcaccgactgtgaaggcttcaagcatatggcgcgcgctgccggctccccctgacgcaatgacgggcaccgggacggcacgtgagacaagctgtgtgagcgtatgattaaagcctgttttttcaccgtctgcgtccatgcttgtcagcaggatttcacccgctccccggctgacggcttcttttgcccaggccgtgacttcccgctcggttttctgtctgccgccgtgtgtgtacactttatagcattccgaatcttcgtcatactttgcgtcaatcgccgctacgatgcattgcgagccgaaaaactcagctccttccgtaatcagctcgggacggagaacggccgctgtattaacggataccttgtcagcgccggcgcgaagcattcgtttcatatcgcttaattgattgattccgccgccgaccgtaaacggaatcgccagttttgccgcaacttgttctacgacgtctgtcatcgtcttgcggccttcgtgagaggcggaaatgtcgagaaaaacaagttcgtcagcgccctccctgtcgtaggcttcggccagctcgacaggatcgcccgcatctttcagcccgagaaattgaatgcccttgacgacgcgtccttctttcacatcgagacacggaatgattcgtttcgtgatcatgcgtccttcacccttctgagcgcttcagccaatgaaaattgttttgtatacagcgcttttccgataatcgctcccgatacgccggcgtctttgaagcgggccagtgctttgaggtcggcgactgagctgactccgcctgaagcgatgacgtcttttcccgttgcttttgcgagctgaacggtactttcgatgttcggtcctgacagcatgccgtcagttgcaatatccgtgaaaatgaaggtttccgctccttcggccgccaattcacggcccagatcggccgccattaccgaggatgtttccagccagccttccgtcgagacatatccgtttcttgcatcaaggccgatcgcgattttgccgccgtattgtttcagcatgctcttcacaaatgccggatcggaaacggccgagctgccgagaatgacgcgatcaacgccttgtgataaataaccgtacacatccgcttcagaacggataccgccgccgatctcgactttgacatcaagctgccgcgcaatgtcaagaacatgcctgtcgtttactttcctgcctgctttcgcgccgtcaagatccacgagatgaatccattcggcgccttcttgtgcaaattgcgccgccatgtctaaaggagagtcaccgtatatcgtttccttgccgtaatcgccttggatgaggcggacgcatttgccgtttctcatatcgattgccggatataatgtaaaagcgttcatttcttcaccttctgttccgctgccatttttgtaaattgtgttaagatcgccattccggctgtaccgcttttttccggatgaaactgtgcaccgaaaacattgcgtttcccgacgacagccggaacacgaacgccgtactcagcgcttgccagaagatcgccgtcttccatcccgtctatataataggaatggacaaagtaaacgaagccttcttccgcttccgaaagcaaaggagacgtttggtgaaacgtcagccggttccagcccatatgcggcaccttcagcttgtttccttcggcatctctgtctttgagtctcacagcttttccggctaataaaccaagtccttttgcagagccgttttcggcgctctcttcgaaaatgagctgcatgccgaggcagatgccgaggagcagcttaccctcgtcaaccatacggtgtatgaattgatcaagcttcgtgctgcgtaaattgtccatggcgtcactgaatgatccgacacctggaagaataaaagcatccgctttttcaagctcttccggccggtctgatacgacatacgggacgccgacgcgttccagcgctttcgacacgctgaataaattgcccataccgtaatcaattacaccgatcatttacagcattcctttcgtagacggcacacccttgacgcgcggatcaatggatgacgcttcatcaagcgctctgccaagcgccttaaatacggcttctatcatatgatgggtattcgtgccgtaatgaacgatgacgtgcagattcattctcgcttcgagcgccagtttccataggaattcatgtaccagctcggtatcaaacgttccgactttcgcttgcggaaatgcagcgcgcatctcaaggtgcggccggttgctcaggtctacggcgacttgggcgagcgcttcgtccatgggcacaagcgctgatccgtaccgtttgatcccttttttatcaccgagcgcctccaaaaaagcctgccctaaacagatgccgatatcttcagtcgtatggtgatcatctatctccgtatcgccttttgcgtcaaccgttaaattgaattgcccgtgctttgtgaacaaatcaagcatatgagtcataaacggcacatccgtgctgatgtcggcttttccttctccgtctatttcgaaagccagccttatatccgtctcatttgttgttctggcgcgttccgcttttctcatcggtcattcctccgtttctcgcttcaatcgatcttgcgtgcgcttccagcccttccagtctcgcgaaggcggaaatgctgtccgcgtgcgtttcaaatgccttccggctgtaagagatgatgctcgatttcttttgaaaatctgttacattcagcgggcttgaaaaccgcgccgttccgtttgtcggcaaaacgtgattcggtccggcaaaataatcgccgaccggttcagcgctgtatcgtcctaagaaaatcgcccccgcgtgtctgatgcttccaagcaaagcctccggcgaatgcgtcatgatttctaaatgctcgggcgccagctcattcaccgtgtccaccgcatcttccatcgattccgtaatataaatgcggccgtgatccctgatcgacgcttcggctatttctttgcgcggcagggtctgaagctgtttattcacctcatctgataccgcttcggcaagcttctgtgaatcggtgacaagcacgcttgaactgagcatatcgtgttcggcctgtgaaagcaggtcagcggcgacttctttgggcaccgccgtatcgtctgccaggaccacgatttcacttggcccggcaatcatgtcgatatccacaacgccgaagacttcgcgcttcgcgagtgctacaaatatatttccggggcccgtgatcttatcaacaggctgtatcgtttccgttccgtaagcgagcgcggcaatcgcctgtgcgcctcccgctttgtaaatttcctttatgccgagctcagacgccgccgccagaacgcccggtgaaaggcggccgtcttttcccggaggactgacgagaacgatccgttccactcccgcagcgagcgcggggatgacattcattaaaacggaagacggataagcggccgtcccgcccggcacgtatacgcccgcggaatcgagcgccgttattttctgtccgagcatcgagccgtctttgcgatggtaaaaccaagaggattgcagctggcgctcgtgatattctttaatattggcaatcgcctgtctgatcacttccagcagctgatcatcaagcagacggtatgcctcggtgatttcctctgcgctcacggccatttggttcaggctgatgccgtcaaatgtttttgtataggccaaaacggctttgtcaccgttttgtctgacgtcttcaataatccccctgacggttttccgctgctcttcggttccgctgtcgatggaacgcttcagtgaaaaccgctcgcttctttttactgcggttatgttcattttgccgtttctccttccacaacccgtgccagcctggccgccatttcgtcgattacatcatccttcatgcggtagctgaccggattgacgataaaacgcgatgtgatgtcacaaatatgttctgattcaacgagaccgttttcctttaatgtccgcccggttgatacgatatctacgattctgtcagcaagcccgattaaaggcgccagctcaatggagccgttcagcttaatgatttccacctgctcgccctgctctctgaaataactcgacgcaacattcggatatttcgtcgcaatcctcggtgcgactccgttccaatccgccccgggaagccccgcaacggcgagatggcatttgctgattttcagatcgagcacctcatacacgtcacgctcttcctcaagcatgacatcctttccggcaataccggcatcagcgacgccatgctcgacataagtcgtaacatccatcggctttgccagaataaagcggagattttcttctggaacgtcaatgatcagttttctcgattcttcaaactcctcgggcagcctgtatccggcctgcctcagcaacccggccgcttcttcgaatatccgtccttttggcattgccattgtgagtaccttacccattcctctcttcctttctggcaccgataaagtatgtgacgtttgcgaatgattttgtcatatgatcgatattttcaatgcccgccagatcctgcaggacgacttttctgcctctcgccctttcttcctccgcgaataaaatagcctgggcccgctgctccttgctgaaaatcacggcgtccgcttcacttgtttcttcctgaatgccgagcgcttcaatcagcctgtcgatacggagcccgaagcccgtggcgggagcgggactgccgaaatggccgaggagattgttatagcgtccgccgcttccgatgacgaaaccgacatttgccgcgtacacttcgaataaaattcccgtgtaataactcatatggcttaccatattcagatcaaggcgaatatgctcggcacatccgtaatcctcaagaatgtcccacaggtcttccagctcctgaattaagctttgtccggagattccgatgatctcctccgctttggcgcaaatctctttcccgcctcgcaattccaaaagtgcgagcagccggcttttgtctattgaagaaagcggaagcgatttgacatgttccctgtatcccacgtaattcttttcaaagagaaagcgccgcagaacatccgcccgctcggcattgcccaaaacctcgacaaacagctcatcagcgagtccggcatggccgatcgcgattttaaaccggtgcaatcccgcgtttttcaaagcgccggccgccagcgcaatcacctcggcgtccgcgcttgttgatccgtcgccgatcagctccgcgccgacctgttcgaattcggccggacgtccgccttcccgctcctgagcgcgatagacgcttgccgcgtaccccgctctgagcggatgattgtgtttgtgcagcttagatgccgccaccctggcaatcggtccggtcatgtcgggccgaagcacaagcgtttttccgtcctgatcgagaagcttaaacagctgctgttcttcaatggctgactggacgcctactgtttcatagaattcaagggtcggcgtctccataaactgataaccccatttatcaattaaatccgtcagtgtggaacggacttttttcttggcttcgtataaaccgggcagcgtatctctcatgccatgcggtttctcaaacataaacatttgccttttacacctccgctttgtctgaaggaaaattccgaatcctttagttcgctaatatgataatatgttagcagataaaagaatggattgcaacgcccaatgtccgcctattcttttccataaacatggctaaagaatgaacaaacctgtaaacatatcggaacgatcgaatcatattgagcagaagtgctataatacatagaacagcttcatcagaaacaagggagaataattgataatgaagacgcttggaacattatgtgtgctgattctgacagccatccttgtctatctgggatataacatctatacaaacgatattcatttaaattttttcaatcagcagtccgacgagcctgatgagaaaacaccgttaaaagggagcgcgtcaccgctgaatgtcgttctgtacagacagatggattctcccagactgtacaatggctgtgaggtgaccagccttgccatgattttgaacaatgccggatatcatgtgtcaaaaaatacattggcggataaaatcaataaagttccgctcacatacagcagcgggctgaagggagatccgaatgaaggatttgccggagatatggaaaacggcccgggtttaggcgtttatcatgagccgattgataaacttgccaaagaatatgcgggaaacaaagtatacgatcttacgggaaaagacatttcttcagtgtaccgccagcttgaaaaagggcggccggtctgggtgattaccaccacatcctttaagccggttgatcatatgcagacttgggatacaccgaacggaaagatcgacattacgttcagcatgcatagcgtagccgtaaccggttatgatcacgattatgtatacgttaatgatccttacggctataaaaacagaaaaacagaccggtctgactttgaaaaagcctggaagcagatgggcagccaggccattgtgatcaagtcataaaaaaccccgctgacgttaatctgcggggttttccattcgttttttcatttcttcgtgcgtataaatcacctgcatcggatttcctccgacaaacgccccggcggggacatctttgtgcaccagcgtgccggctgatacaacggctccgctcccgatggtgacgccgggcagaatggttgtgtttgccccgatcatcacctcgtcaccgattgtgacaaaaccggtccggtactcacgtattaaatattcatgagccaaaatcgtcgtattgtagccgataatgctgttttttccgacagtgattttttcgggaaacatgatatccggcatcaccatcagcgcgaatgacgtctgttttccgacattcattttcaaaaaggttcggtacagccagtttttcacgcttaaaaacggcgtataccttgcaatctgaatgatgatgaaatttttcatcaccttcaggaagggaaccgtctgataaacatgccacaatgaatttgcacctgcaaccggatggcggtctgtttttctcacggattacttcactccggtgatgtgcaataaatcactcattttctcgagcatataatcgggttcataggcggaaagcgtctgtgcgcctttaatcgtccacgcgacgccggctgttttcgtgccggcgttttttcccgccatgacgtcgtgataattgtcaccgaccatgatggcttccgacggatcgcacccaagccggctgagcgcaagccgcacaggctcggggtcaggcttcgggtgctttacatcatcaagcgtgacgacagtatcgaaaaacgccccgatgcctgtcagcttcaatcccatattgactgtatccctcagcttagtagtgacaataccaagctgatagcccgcttttttcaattcatccagcgtttcataaaccgtttcgtactccgtgacgagctcatcgtgctttttatggttgaatgctctgtacatgctgatcatgtcatcgcacttttcggcattaatgcctgaaaacgtttcgtacagaggcgggccgataaacggaagtacatcttcccttttaaactgccccgggcaataatgatcaagcgtatgaaggtaagaagcgataatcagttcattcgtgtcaatcagcgtgccgtcgagatcgaataaaatggcggttacatgtttatcagtcatcttatgtcctttccgatttcagtcgtcagtccgtgtcagcataccgcttatcggcataccccttcatgcgtctgaaaatcattaaaataatcgcaagtataatcagcacaatggaaatgacctgcgcgatccgaagctggctcgtaagcatcaggctgtccgtccgcattccctcaataaagtatctgccgattgaataccagatcacatacgtcaaaaacagattgcccctgcgcaggttcacgcggcggagcagaagcagaatcacgacgcccgcaaaactccacagcgattcatacaaaaacgtcgggtgataatattgtccgtctatgtacatctgattaatgatgaaatccggaagatgcagactttccaaaaatgaccggctgaccgctccaccgtgagcctcctggttgataaagttcccccagcgtccgatggcctggccgagcagaatactcggcgcggcaatatccgccagcttccagaatgagatgcctcttacttttgaaaagacaattcccgttgcgatcgcgccgattaatccgccgtgaatcgcaatgccgcctttccaagttttaatgatttccccggggtgttccgagtaatagctccactcgaaaagcacataatatgcccttgcgcaaatgattgcgatcgggatggcgaaaagaacaagatcaataaaaatgtcctttttcagcccccgcttttcactctccctcatggccatccaaagccctaataacgcgcccgcgccgataatgatgccgtaccagtgcacggataaaggcccgagctgcaaggcaatcggattgatcggtgttccagcttcattcatattattgccaactcctattcgtcttgttcgccgtcctcaatgacatccgccagcttattcgtgaattgttcggcagcatttaagcccatccgcttcaatctgaagttcatcgccgcaacttcgataataacggcgagattccgccccgggcggacgggaatggtcagttttgtaatttccgtatcaatgattttcattttttcttcttcaagtccgagacggtcgtattgctttccttgctcccaaagctcaaggtccatgacgattgtaattcttttattgcttctgacggcgcccgccccgaacagcgtcatgacatttataatgccgagccccctgatttcgagcagatgctcaatcagatcaggcgcgttcccgacaagggtatcctgatcctcctgccggatttcaacgcagtcatccgcgacaagacgatggcctcgtttgacaagctccagcgccgtttcacttttaccgacgccgctttttcccgtaatgagcacgccgacgccgtatatatccacaagcacgccgtgaatggccgttgtcggcgcgagacggctttcaagaaaattcgtcagcctgcttgacagcctggttgttttcagaggggatctgagcacaggcacgccgttttgctcggaagcttctacaagctccggcgggatcggcatatctctggaaagtatgatagccggcgtcacatcggtgcacagcgatttcatccgctgtttcttatcttcctcgggaagctgatcgaaaaatgacagctccgtttttcctaaaagctgcacccgttctctcgggtaatatgtaaaataaccggcgatttcaataccgggccgtgataaatcactcatcgtaatcgggcggttaatcccttcttctccgctgatcaattctaaatggaactgttccattacgtctttggtccgaacctttgccaagatatgttcctcctgttctgggatgttccgagctttgaacagttatattttatcactttaccgtctgaaccaaaacagatttatacaattccggcataactggtctagataactagtctgaaaaggagtaaaataaaactaacaactaaccagaaaggcgtgttttaaagtggctgaaagcttgttaatcagcggtgcggacatcgtaacagaaaaagaaatcatccgaaacggttttctcggtataaaggacggcatcatttcttacgcgggaaaaacaaggccgcaagaaacgtatgagaaggaatggaaggcgcccgagggctcgtatgcgcttcccggaatgattgatatccatattcacggcggatacggcgcggatacgatggatgccgatgttgcggctcttgatacactgtccgcccggctgcccgaagaaggaacaaccgcttttttagcgacaacgatcacacagcagcacgaaaacattgaaaaagcgctcatcaacgccaaaaaatgggcgtattcctcaccggagacccaaaaaggcgctgagttgatcggcattcatttagaaggaccgtttgtctctccgaaaaaggcgggagcacagccgaaacaatggattactcctgctgatgccgggctctttcagaaatgggagcggctctcgggagggctgatcaaaatcgtgacgcttgcgccggaagaagatcctgatttcagcctgatccgttatttaaaaaaccaaaacatcatcccctcaatgggacacacagacgcaggagccgagcttttacaaaaagcggcggatgccggggcggtgcatatgacgcacctctttaacgccatgagctcctttcatcaccgtgagccggggggcatcggtacggctctcgcctgcggccgcatcacggcggagctgatcactgacggcattcattctcatcctctggctgttaagcttgcctatttggcgaaaggaagccaaaacctgatcatgattacagactccatgcgggcaaaagggcttaaggacggagaatacgaattcggcggacaaaaagtcaccgttcgcggggacacggcgcttctctctgacgggacgctggccggttccattttaaaaatgaatgaaggcgcggcgctcatgcgcaggtttacaaactgctcatggccggatatagcaaatatgacatcggcaaatgcggcccgccgcctcggcatattcgaccgtaaaggaagcatcgccgaaggaaaagacgccgacgttgttctgacggacggacagtgcggcgtgctggccacgatttgccgcggaaacaccgcatatatctcaagggaggctgattggacatgaacgttatcacatgcagacattatgaagaattaagtgaaaaagccgcagcgattatcgctgaaacagtgaaacaaaagccggatgccgttctcggccttgcgacgggaggcactcctgaaggcgtatacaaagaacttgtgcggatgcaccgctcagaaggcttgtcgttccggaatgtcacgacgatcaaccttgatgaatacgccgggctttctcccgaggacaaaaacagctatcattattatatgaatacacatttttttgcacatatcgacagccgaaaggaccgccactttctccctgacggacgggcagacgatcttgatgccgaatgcgggcgctatgaccgattgattcaaacactcggcggagcggatatacagcttttaggcatcggacacaacggccatatcggctttaatgaacccgggacgccatttgaatcccgaacccatgttgttgagctgaatgaagagacaagacaggcgaatgcgcggtactttccgtcaattgatcaagtccctgaaaaagccctgacaatggggatcgggacgattttgtccggcaaacggattctgatcatggcatccggaaaaagcaaggcccaagcggtgaagcagcttctggacgggcgcgtcagcgaagcattccccgcctccgccctgcacgcgcatccggatgtgacggtcttgattgatgaaaaggctgcgggcggcgattgaaaggatttgacctatgcagattgataaacaatctccgattccgatttactttcagattatggaacaattaaaaacacaaatcaaaaacggcgagctgaaagcggatgcgctgcttccgtcggagcgggaatacgccgaacaattcggcatcagccgcatgacggtgcgccaggcgctttccaatttggtgaatgaaggatttttatacagacagaaaggccggggaacgttcgtcagcaaactgaagatggaacagccgcttcaagggctgacaagcttcaccgaagatatgagaagccggggcatgaagccggggagtagacttgccgaataccagctgattcaggcgacggaagaattatcttctatcctggggtgcggctatccggcaacgcttcataaaatcatccgcgtccggctggcaaatgatatcccgatggcgattgaggcatcgtatatcccgtttgacaaggcgggaaaattggatgcctcccattttcaatcatccatgtatgagcatattgaagcgtacaatcagatgccgatctcacgggcaaaacaagagcttgaaccgggaaccgcttccgaggaagaagctgagctgctcggtatccagcccggcgcccccgtcctctatatcaagcggaccacttatctgcaggacggcactgcctttgagcacgtcaaatccgcctacagaggcgaccgctacacattcgtgcattatatggacagggtgaaatgaaacatctccaaccgttacgggttggagatgtttttttgatctgccattttcaaatcaagccggtgaatgttctctatgactctgtcaaaacgaagaggctggggttccggtatctatttttataaagaaaagagtaataaaatgctatcctctgttttggacaatatacggaacctgctttgaaatcagcagcagcggttctttgtttttatgagccaatgaaaacatgattgcgccttcaatcatcgagttgattgtcatcccaagcttctccgcttcctcttgttcaaacccatgctcaagaaattttgccgcaaacacatccgtccacttcttgaacacctcaacacatgtgcatcttaacgtttcattgatcagagcggtctcacccgccagcaatccaaccggcacgccctcaatattctgcggatcattaaactgttcagccgttacatgaataaagtgctgaatcgcttctacagggtccgcggattgagacatactattctgtatctgcttttcaacgcatcttcccgtatatttgatcgccgcaatggcgagttcttcttttccgtttggaaagtgatgatacactgaccctctgggtgctccgctctcttttataatttgattcaaaccagtcgcatggtatccctgaatctgaaaaagatatgcagaggtttgaataattctttcttttgtcccggttttactgttcattatgtttcctcctgcatattacgaaaaccaatcgattttagtatagaaaagggacataaaaaagtcaaaaacacttaccgccatgcatgttacagaaaaaaacctgctgaccgtcagattttcttctgaccgatcggcaggtgtatgtttttgctatgggtttgaggcatgcctgaaatcaaactgatccggagccgggtgatacggcgtatttcccgttttgaacatccacagcggtgatattgttttgccgttgtacgggtccttcacgacggtgtaccagtaataaacggaatcaggctgcaggccgtcccagacccaatttgcggtttttccgctttttacgtgttttttatgaccgagcagttcgttcgtataaacgttgcattcaaaataatcagtcgctacccttttcctcttcggctgtaaatccatttctgctgagaattcgtctttatcagcgaacagatcggtgtcatagtaattgatgtcatccgtgtacggcgagtaggagaacatgtgaacctgattggcggcctgatcaaattgcattatgcgcataaagccctgcccccttccggaccgtcctggtagtcggtcagaatttggtggacgaggcggtccggttttccgtctccgtcatcgtcaagcgcatcggtttttttcatggcgttatggtaatggccgcttaataccatcgccacattgcgattcggcttgacgacttttcgatagatcgtctccccgatcgggcttcgatttccgctcacaagcaagtactcatgaaagcataagatggcggttcggtccggatacctcttcagcacttgattgatccagtcaatctcttgttccgtaatgccccagcccatataaatcataataaaatcgttcccgcttgccgacagcagatcataatgcccgcggttatttttgtatgatccgccgtaatgcatgttctgttcaaaccggcggctcccgaagaaatccccgaaggttcggtatgtgccgtctttatggccgacgtcgtgattgccggcaagcactccgtacggaatccccgccttgtcaagcgtccgcatggagtgatcggcgtttttccactgtttcatcaccattgaatcatcgacaatatcaccggtatgaaagacatatttaatattgtgcttttccttattttctttgatccactccgtcattttgtcaaaaatgtgcgggtgcccttgtgcgtaatactgtgtatccgacatccagacaaacgtgtaattgcctttcgccggtatttgatcctgcacgatgacattcatttttgagttcttcaccacatccgctgcggaaacggcggcttttaatgtaaacggctttttatctttggcaaggacgctgtccgcctcctgccagcggcttgtccggtaattccaaatatacatggttacctttcggccgggcagagagcttcctttccagaccgcctcggccagatccgtttcgtcgatagacgggtcaacggagacttcgaaccggtgataaggaaaacgctccacactttccgccgaaacggtttttccgtcatttgccgagatacggttcatttccggcagggtaaacggcatttcattttcttttatgcccttcggcggttccgttaatgaggcgtgtttatacactttcacgctgcccggattccgcgcggtataacggaagccgcgataaaatgatacattcatgtcatccttcgtcgggtcttttacccggacggacagctttgctttgcgggcgccgattttttgaccggcaagctccggctggttcggctcctcccgtttgatatggaaggtgcggacggacgttgtttcatttccggcaaggtctgccgcaatgatagtaagggtgtgctttccgggcttgagatcggctgatgacgtgtgatgcgggagcgtaatgctttctccgtccaaaaacgctttcacctcttccactttgctccatttatcacggatgtccgcattcagctcaacattacctttcagcgccgcgccttctttaatacccgggacaatcttcggccccgaattgtccaccctcacagattggctcagctgctcctcaccgtcactgacaaaaatatggtgatagccttccgaaagcttcgccgtgttccacggcagcagccgtgacgtaaacaaatgatccggcaggctgaatgagaaggtcttctgctgattcgcccgcttgccgtcaccgataaacagctgctcggacgggtccgtcttcccgtctttgatcaccgttccgtccgaaagcaccagacgggcatgtttcacgacaaaatcatcccgattctctcccgtgtcatacggagaaacctttgagcccgaacggatggatactttctgtgttttgcccccttttagcagcagacgttccggaagcagaaccgagtgcgttctgtagcggtgagacggatcgtcaaaaatgtgcagcacctcgttttccatcatgacggtgttttgaaaataaagattcgttttccgggcatcgaaggcgaaatagacctctttttccagcgccggccgggtctcctgccgcttgccgtcaatccacagcttgatcttatcggcgctgacgtcggaagtcgctttgagcagataggtgccggatatcgtatcttccggttcaacattcattctgagtccgtgtgatttgctcgtctgttcaatgtcaatcatcttgacgggcgtttttgcttcattttctccatcactggctgcgatataatactcaagctgatcctggccgagcagttccggggaataaagaatgtgatggtataagctgtcgttgcggtctttttcggccagaattcgtttgaatggttttttctcattggtccggtaataaaacgcggctgttttgacaaggtttttgtcttttatgtcagcctttaattcaatgctttcagcgggccggacgggctttctgtctgtaaggtcttcgatgaccggtttttccttgtcgggtttgatcacccttttctgctgcggaatctgcgcctgaaaaacggagcccggtgacggcttatgctcgctcgtggagatcttcagcaattctcccgttccgttcagcggatatttgtacagcaaagaagtcagccggcggaaagcgtgtttccggtattgcgctgaggcgatatccttgccggtatttgccgacagcacgaccgtacgcgggcggccgttggacattccgtctgtcccttcgatgacggcgagatgttctccttccttcagacgtgtcccgtaatagcggttgaaatcatctatcgtcagttctgatgcggcgcgtctcagccaaaacacgtaagtcccgcctgacggaatgacggtatcctctttcggcctccatatcatatctgattccggcccttccttcggatagcggtagcggatatgatagtctttaaaatgaatgggcctgtccgtcgtgttatacacctcgataaattcataggcatcagcgccatcttcatttttcgtatcaaccgcaagctccgtaatcatcagctcgggaatatgattcaaatcggcttgatagccgtccagcttcagccgctttttctccgattccgcccgctgtctgccgttggtgaaaacgaggtaatattccaattctccattccagatatcccgttttgaaacctgggccgtaaaaagccggattgcgcctggcgcgggctccatcggcaccatcttaaaccccagctcattgctttgtttataaaaaagaaacgccgaaaacgcttgatagtcagcattccgtacatgagcctgtatgaacaggtttcttttcatttccgcctttacttcgatttggggaggattctccagaagcggtatgtaatgaggcggctgtccgaattcctgctgattcacggggattgccgattctttgcgcgccgcatccgcagaaggactcacacaaagcaaaccaatcagaaaaaagagcgtcatcacaagtttcatctcattacctccctatgcattatgttgcgtcaggaggctgccgcttatgtaaaccgcacataaaaaagctgccctctcgggacagcttgttttttatccttttctaagcggctccaatatgcctttttggatcagcaagtggaaaacggacagcacgacggatgcccaaatggcggtgccgaacccgtcaatctgaaagctgtctcccatcaaggctgcggtcatcattaacgtaatggcgttgatgacaaacagaaagaggccgagggtcacaaccgtgacaggcaatgtcaatatgacgatgatcggtttgatcagcacatttaacacagaaagaatcacactggcgatgacagccgctccgatactgctgatatggacggaatcaaaatatcccgcgataacgattaataataaagcatttactaaaatgctgactgcccatttgatcatttatttcaaatctccttctaaaggtacaacaaaacaccagataatatatacaatcggcacgattccgctcgtgacaagcgctaatacaacggtgataatgcgcaaaagcgacgcatccatattgatgtactccgccaaaccgccgacgacgccggcgattttacggtttttttctgaacggtaaagtcttttcatccaatcacctctgagtatgcttgagcttaatggctcctgttaacgattctgagaaaatcgagagatgctgatcatggccttgatttgatgccagcatcagttctttttgaatggtatcattcttttcctttaaaatttccgcatcaatcagctcatggctgagagagccgagattgcttttgagctccgctttcaccgccgaatcatcaggcagggcgatctccacgtttccggtcgtcgttttcgtgtagatggagcggcagtgcggcgctgtcacggtaagcatgatattgccgttaaagctttgaacgtcaatggattcactcgatccgcgcaaatcaatcaagccgttgatcgtttccgcttcaatcgcgccgcattgatgtccggccagcttgatttgtccgttagccgtttccgccgacgctttctcagccgtcaaatgagagaatgacagaacgccgtttgtcgttttcgccgagaattcttttacatgtaaatgttcccctctgatcggtccgttaaacagcttcactcttatcttatcgtactctttctgaggaacataaagcgtaacattggttttcatcgttttcttttccgtgcggacaaaaaacttattgcccttcacttcacactcaatatgctgaagaaatgcggtgcgcgccgcctcctgactgtccgcccggtacactttcgcctggcactccgctctgatatcttcatccgcccacggcacgatattgacgctgccgtttgcaatctgcatatcaatggccgagaattcactgtctttaaattgaaaaatatgctgcacttcgtgtgcgtggccgaaattcagatcaagatccgcttccttcacttttttgacggcagaatcaatccagtcgaacagcttcgccccgagcgacggcttttggcttccttttgcaccgctttcgaaatcttccgcaggttcctgaacctccgcagataatgcggtgatctgatcttctttttctttatattcatgatccagtttttcaatgagcgtcagtgcttcctgcgccgtcagcatgccgtcttccacaagctttaaaatccgttctttctcctgtttcatacaaaactcctcccccgacttttcttacacctggcgtaacaccttaattccctgcacgatattccaaatgaccattccgatgaggatcagaaaataaacagctgctcctgttatcataacaaaaacgggcaccatactctccccctgggccgtaatcaatccgccgacaacaccggcggtcacaatcagcaagcccgcaaacggaatgatatgggaaatcagagcgcgcatggcatgccgcttcgtctctttttcatcgacgacaaagtaagccacaatcggaagaatgagcggcgcgagaaacacgctgaaataacagattgatgcgataatcgcttgatttcggttcaataaaaacactccctgtgccatgatataaaaaaccattccttatacatacgtatgacgaatgagcgggtttcattttcatgctaaggacatgcttcgttatacgtaatttttggtttcagagatttcactatagaatcttttccccgaaccgattacaatatgtaacaaagcctgaccgtatgcaaggaggacatacaaatggagaaagatcccgaaaacgcccaagtaacggaagagagtcttcgaaatttaattcgcgaacagaaaagaatgaacagcgaaatgctggctgaattagaacagatcaaagcagcccctcttcccatttcccatgatatccaatatataaaagtgctgctggacagcagcagcacccatattctgcaggacttaatgcatttaagcagacagcttccccaacagaaaaaaagcctgtaacaacaacagcccaaaaccgatgagttttgggctgtttttattgatctattacgtggctgccgtttctttttcggccagcaatgttttcatccgttttttatcgcgttccattaccggtttcagatagcggcccgtatatgattctttcacttcgacaacttcttcaggcgttccggaggctacgatcgtgccgccgcccgctccgccttcaggtcccagatcgacgatgtagtccgccgttttaatgatatcgagattgtgttcaatgaccaaaacggtatcaccgttatcgacgagtctttgaagcacaaccaaaagccttgcgatatcatcaacgtggagccctgttgtcggttcgtccagaatatacagcgtccggccggtggaacgcttatgcagctcggaagctagcttgacgcgctgcgcttctccgcctgacagcgtcgtcgccggctggccgagcgtcacatacccaagtccgacatcagcaagcgtttgaagcttgcgtttaattttcgggatattttcaaagaaagacagagcatcttccaccgtcatatccagaacgtcggaaatgctttttcctttgtatgtgacctcaagcgtctcccggttgtaacgtttgccgtggcacacttcacacggaacgtacacgtcaggaaggaagtgcatctcaattttgatgatgccgtcgccgcggcaggcctcacagcgcccgccttttacattaaaactgaaccggccttttttatagccgcgcacctttgcttcatttgtctgcgcgaatacatcgcggatatcatcaaacacacccgtgtaagttgccggatttgatctcggtgtccggccgatcggcgcctggtcgatgtcgatcaccttatcaagatggtcaaggcctttgatttctttatggcttcccggtttcgctttggctttatgaagcttttgcgcaagcgccttatgcagaatttcattcacaagcgtgctttttcccgaaccggacacacctgtcaccgccgtaaaagtgccgagcgggaatttggcgttcgcttttttcaggttgttttctgaagcgcctttgatttcaatgaaccggccgtcaggctttcttctctccggaggcatcgggatgaattgagcccctgacaaataacgtccggtcagagaatccgcatcattcatcacttcttcaggcgtccccgccgatatgacgcggccgccgtgaatgccggcgcccgggccgatatctatcaagtaatcggcagccatcatcgtatcttcatcatgctccacgacaatcagtgtattgccgagatccctcatgtttttcagcgcgctgatcagacggtcattgtcacgctggtgaaggccgatggacggctcatcaagaatgtacaggacgcctgacaaacgggagccgatctgcgtcgcaagcctgatacgctgggcttctccgcctgacagcgttcccgccgccctgctcagcgtcaggtaatcaagaccgactttatctaaaaagctgagacgctccacaatctctcttaaaattaaatcggcaatctgcatatctttctcagacagcgtcaggtttttgaaaaattccagcgcatcgccgacggaaagctcggtaatggtgccgatgtggcgcccgttgaccaaaacggcaagcgcttctttcttcagccggtagcctttgcacgtcgggcacggcttctgtgacatgtactgctccatctgttcacggatataatcggagcttgtctctttataccgtctctcaatattgcgcagcacaccttcaaattcaatttcattttcgcgcacttgtccgaaatcattctcgtatttaaagtagatccgttcattgccgctgccgtacagcactttatcaagctgatgcttcggcaggtctttgaccggagtctccatatcaatgccgtaatggcggcagaccgcctgaagcagctgcggataatattgtgaactgatcggcgtccacggcgcgatggcgtgttcctttaatgacagttcaggattgggaatgacgagctcagggtccacttccagcttcaaaccgagaccgtcacaagtcgggcaggcgccgaacgggctgttaaacgaaaacagccggggttcaagctccccgatagaaaaaccgcacagcggacaggcgtgatgctcgctgaacatcagctcttcctgaccgatgacatctatcatgacacggccttcccctaagcggagcgcggtttccagtgagtcggaaagccgggcggcaaccccttccttgacgacaatccggtcaatgaccacttcaatggaatgctttttgtttttttcaagttcaatatcgtcggaaagctcggccatttctccgtcaatccgcacccttacgtaaccttgctttctgatttggtcaagcactttgacatgggcgccttttctgcctgagatgatcggcgcaagcacttgaagcttcgtccgctccggatattcaagaatccggtcaaccatctgttcgatcgtttgcgacgtaatttcaatgccgtgctccgggcagtgcggcttcccgactctcgcgtataagagccggagataatcataaatctccgttaccgttccgacggttgaccgcggattgcggcttgtcgttttctgatcaatgctgatcgccggagaaagcccttcgatcgcatcaacgtccggcttatccatctgccctaaaaattggcgcgcataggcagaaagcgattcaacataccgcctctgtccttccgcgtaaatggtgtcaaaggcaagggatgattttcccgatccggacagccccgtcacgacgacgagctgatcccggggaatcgttacatcaatgttttttaaattgtgcgcccttgcgcctttcacctcgatccggtcaattgccatgtgttcatcatccttccgctttaagctctaacagtaaatcacgaagctctgccgcccgctcgaaatcaagcgctctggccgcttctttcatttcgtgctccatttgctcaacgactttctggcgttctttcttcgtcatcttcgccagtttaggcgcggcttttgttttatattcttctttatcctcagcggcctgcgtcgcgcggatcacatcgcggatttccttattgatcgtttgcggcgtaatgccgtgaatttcgttaaagcgctcctgctgttcccggcggcgcttcgtttcattaatcgcgatttccatcgaattcgtgattttatcggcatacatgatgacgcggccttccgcgtttctggccgcccgtccgatcgtctgaatcagcgaacgttcagaacggaggaagccttctttatccgcatcgagaatggcgacaagtgacacttccggaatatcaagcccttccctcagcaggttgatgccgattaacacatcatgttttccgaggcggagatcacggatgatttcaatccgttcaagcgtcttaatctcggaatgcagataattgaccttgatgccgatttctttgagataatcggtcagatcctctgacatttttttcgttaaagtcgtcacgagaacgcgttcattccgttcaatcctcgcctgaatctcgccgatcagatcatcaatctgtccttcgatcggacggacgtcaatgaggggatcgaggagtcccgtcggtctgatgatctgctcgatcatttccggcgtatgctcaatttcatacggtcccggagtcgccgacacgtacacgatattgtgcatatgcttttcaaattcctcgaatcggagcggacggttgtcaagcgctgacggcaggcggaacccgtgatcgacaagcacctgttttctcgcctggtcaccgttgaacatgccgcgcacctgcggaatcgtcacatgtgattcatcaacgacaatcataaaatcgtccggaaaataatcaagcagcgtatacggcgtagaaccaggaggacggagcgtcaaatgtcttgaatagttctcgatccctgagcaaaaacccatttcccgcatcatttcaagatcatacctcgtccgctgctcaagccgctgcgcttcaaggagcttgccgttttcgcgcatcactttcaagcgctcctcaagctcctgttcaatattcagaatcgctttttccatcttttccgcccgggtgacgaagtgggaagccgggaaaatcgcgacatggtcacggtcgccgagaatttctccggtcaaagcgtcgacctctctgatccgctcaatttcgtctccgaaaaattccactctgatacaatgttcgtcacgggaagccgggaagatttccacaacgtctccgcgcacgcggaacgtcccgcgctgaaagtcgatatcattgcgggcatactggatatccacaagctttctcagaagctcgttccgctcaatctccatttccggtctgagcgacacgaccatttcccggtattcttcaggcgaaccgaggccgtatatgcatgacacactcgcgataataatgacatctctccgttcaaacagagaggatgtcgcggaatgtctcagtttatcaatttcatcattaatgcttgcgtctttctctataaaagtatccgtttgaggcacgtacgcctccggctgatagtaatcgtaatagctgacaaaatactcgacagcgttgttcgggaaaaactccttaaactcgctgtacagctgtccggcaagggttttgttatgggcaatgaccagtgtcggtttgttcacttctttaatcagattggacacggtaaaggttttgcccgtccctgtcgcacccaggagagtctggtgttttctgccttcctgtatgcctttgacaagcttctcaatcgcttgcggctgatctccctggggctgatatttcgagactaactcaaaacgatctttcacaaaaaagcctccgtttctttacgaaatcttcctattgatatagtaacacaatgacgggcaaaatcactaaaaatacgaactaaagttcgatggtttatttttaccaagtcaatttttgtataaaaaacctgcttttatggcgtaaaagcaggcattctatttcatattcaccatgtcaggcattgtctttctttttgtctgcttcttttttggccatgtacagccctccggccaccagcgatacgacatccaatccaacgataaaatacgtttcggtgtaaccctttaaataggatgcgaaaagcagtgcggctgtgagagcgatcgccacatagtggttaaacgtgacgcgcgtaaaaaggacgaccagcataaaagggaaacataatgcaaaaacggcttttgtaatcacaaaaaccctcctcgggaattcttcatctcatctgattatagtaaaaaatgaagaatcggacaatcgttcccctgctatcacaataccctttttcggcagtcttcaatcatctgtcaaagaaaatgtgaatataaatccattgaaccattaaccagatgaatcgaattacctttcttcagccgaaaggatgagaaggtttaggtctttgtatctttgacagtttcttcctccctctttacaatgtaatgatagtgtttactatcattttcttggatgaagaaaaaaagggggtcataccgcatgtattcagtgcgatttcaaaaagcggaagaatcgagccgctctgcaggagcaaaaggaatgaacctgattaaactgacgaaaaacgggctgcccgttcccggcggttttatcattcagacgaatgccctgacacgttttatggaagacaacgggcttcaagcagatcaggaacagctggagcgcgccattatgaacggcacgttttcaaaagagcttcgggaggagctgaccgcatcgttttatgaattgagagaatcatacgcctctgtcgccgtacgttcctcctccgcgtccgaagatcttgaaggcgcttctttcgcgggacagtacgaaacctatttaaatatcaaaactgaagaagagtttctcggaaaagtgaaagagtgctgggcttccttcttctcggcgcgggtcagcggttataaagagaaaatgaacaatgacaccgcagaaccgttaatgggcgttgtcgtgcaaggtttgatcaattccgaggtttcaggagtcattttcagccgcaaccccgtcacacatgatgacggagaactgatgatcagcgcgagctacggcctcggagaagcaatcgtctccggcagcgtgacgcccgacacatttatcgtcaataaagacacatttcagattgaaaaagaaatcggcttaaaagaaatgtatatcgtctctaaagacgaaggcgtgacggaaaaagagacgtccgctgacatgagaaaccgcttctgccttgatgacgagagcgtcaaagagcttgccatgctgacgataaagacggaggaactgtacggttatcccgtggatctcgaattcggatttgccgaaaataagctctatctgcttcaggccagaccgattacaacgatcgcgcaggatcagaaagcggcagacgaagaacgggaatttatcatgacgccccgggatcagaaagatttttggctcaatatggagtccaatatagaaggtcccgtcagcccgttattcgcttcactcattgtgccggctttggaatacggtctcaaagagagcacgaaggccttccctgtgatgggcatcgagattgagcgtgtcaaacttcatcagggccatgttttttccagacagcataagacggacgacaagctgcccgcagaacagttagaagcgcttttccccgtcttggctgaccgcatgtacaatattattcaggaaacctttctgcctttttatcaaaagctggacgaactggcgcatacagaccatacgccggagactgccattgatgcgttccgaaacctgcaagacttctatttaaaaggatacgcagaacatttcaatattgtctttccgcaggttgcgttaaacatgatactggaatctatgtacggacaggttgagaaagaaaacacctcccttctgtatgaaatgctggccggcgtcatgaataagtcattggagaccgacagacagctctggctgctttccggacaagtaaaagacagccctgagctgcggcgcgtctttacggtttctcatgccgatgagctgcatcagacgcttctgcaatcaaatgagggaaaacgctttcttgaacaagtcggcgaatttttacaggaatacggctggagatccgtgaaaagtcatgatctcattgaagaaacttgggcggaaaacccttatttcgctttggccaacattcagaactatgtccgaaacggatacgattttgacagtgagtttcataaaacgatagaaaaacgaaaacagctctacgccgactttatggatagaattgaagatgacggcttccgggagacgtttgaccgctattatcagtggacattgtcttcatccgtcatcaaagatgatcaccatttttatattgatgcgatgctggacgccaaagcgcgcctttgccttctgaaaatcggcgagctgcttcaaaaacaaggcgtaattgatgatcgggaggatatgtggtacttatacagcgatgaagtcgagaaagcgctggcgtcgccggttccgatgcaggaaaaagccgctgaacgaaaacggctcttcaagcaatatcaattgcttgaagcccccgcttatctcgggactccgacttcggaacagctgaaaacggctgaacagattaccggctccatcacagaagatgaaaaaaacactgaacatcaaatttacggacttgcagcgtcaagcggaatcgcaagcggaccggtgaaagtcattcgtgacgcaagtgaattttcccgtttttcaacaggagacgtgcttgtctgcaaaatgacgacaccgctttggaccagtctgttccaggatgcaaaggccgtcattacggacacgggcggcatcctgtcacatgcggcgatcatcgcgagagaatacgggctcccggccgttctcggcacacgtgccgcgactgacaggctcaacgacggagatatcgtcacggtagacgggacaaacggcaagattacaattgtcaaacgcgcttcatgctaggtttccctctttattgacgggcagggcgggtgtatacttgtcctgccagtatttacgcgaggtgaaacatgttgagaacgacgaacaagagaattattgacgccgcgatgaatctgatcatccaaaaaggataccgcgcagcgacaacaaaggaaatcgcagaaaaagcaaaagtaagcgaagcaacgattttccgtaattttaaaaacaaacaaggattaatgaaagccatgattgaacagcaggcgccggttccggaaagcatgatcaccaaggcggaaggcgatctgtatgaggatcttcttcatttcgccacgacccttctgcagcaattggaacaaaaaaaagaagtgttccgcatctgcctgcgcgaaccggaactattcgaagacgtcctgcaggatattgtcgtatatccgcaatccgtgaaaaagcatttaatcgtttactttaaggagctgacaaagaaaaatatgataagccccggcagcgaagaagctaatgcagacgtctttatgacgatgattttcggttattttatacaccggctgcagctggggaaaagagtcattactctctctgaggaaacgatgctgaaacacagcactgagattttcatgaaaggcattaccggccggtcattttccggctccaaggaggatgaaggatgggttcaaagaaagaatgggcgctgatcgtttcgcttttgctgggagccatactcgttcccatcaattctacgatgatcgcagtcgccctttcatccatttcccgctcattcagcgaatcaattgccagcatcacatgggtagtgaccgtgtatttaatcgtgatggccgtgacacagcccattgccggcaaactcggtgatatgtacggaaacaaaaaaatgtatttatggggcgtcggcctttttctcatcgcatcattggggtgcgccctctcgccaagtcttttcttattgattttcttccgggcgcttcaggctgccggcggcgctttgcttacgccaaacagcatcgccatcatccgccatgtcgtgtctgaaaaacggcttccgaaagtattcggctttttcggcctcggcgccgggctgggcgcagctctcggtccgtttatcggctctctattaattgagagcttcagctggcattcgatcttttgggtcaacattccgtttcttgcgatcgcactcgtgacggcattaatgatgtttcctaaatataaagaagaaacgtctgacgctccgcttgatatcatcgggtccgttttgcttgccggaagcattgtatctattattcttctgacgaaaaatgaaagctctttgggctattgggtgtacgcgctgctcattctcgtattggttccgctatttttcaggcgggaactgcgcacgaaacatccgattattgattttgacctgtttaaaaacacgacctttacgagcgccaatctgtcggttctgttaagcaatttaatgatgtacgccgtgttattgattatgccgctctttatgaccggccacttcagcatgaacacgtcgcacagcggcatggcgctgtcagtcttttctgttttcatgtccgccagcaactggggcggagctcagctgcatcagaaatggggcgcgcgaagaatgatttttctgtccttcgggctgatggccgcagccaatctcttatttctgcttttggtttattcccattccgttccgtttcttatggcatcgcttattgtaggaggcatcgcgtcaggtgcggggctgacgagcatgcaggtatcttctcttgcgacggtagaaccgggcatgtccggcatcgcatccgggattttctccaccttccgttatttcggaagcattatttcttcagcactgatcggtttaatctccgggtttcatattctgtttatcatattgatcggagtttctgtgatcggcttgttcgtatcgcttggaattaagtccggggaaaccgttcagacgaaaaaaagccattcggcataacgaaaaaggttccgtaagcatcagctttccggaaccttttctagttttccttcttcattttctctctcaaagtgtcaccgcaatgccgtttgctctataagaatcttttgatttacaagagaaaaggggaatgtaaatggctgagagttccgatcaagttcggcgctgacatcgtaatccggccgtaaaaagcccggccgccgtcttttattttatttatttcactcactcctatgttcaacttgagcccactatcattactatataaacctataagtattcaagatacatttaattgtacttctctatctcgctgctctgccagcaacaaattcaccatatcactatagctattcaaaccgtctgtctgattatttgccttcagatatacatcatttacatttcttgaaatacttgaaataacaccctcatacttatcccggtactgctcattttgttctatatcatgctgcaccgccttggacagactggacattatatcagacgcctgatctggatccactttctttagctcagatatagaataaacaaatgctagaaaaaaaccactgtaaagtatcattggatcatcctgctgcttacatgccagatatgctataaaatttgcctcatcctcatgcatgaaaccactctgatgtgccaattcatgtgccatagtagcaggcaccaagaaaacgggcacattaacattgatattggattcataagtaaaagggacaaagatgccatttatccctgcatgcgacattagctttgacatcacaactggttttggtgttgagtataaagaatgctccaaaataggatattcctttgataacatttgcatcgagaacactgcgtgttgtgcataataatcaaaaacctctggtacttgagccaaaagatcagtgtccgctaacttttcccttgccaattccatttcaacggcaagcgacttactcaatttgaccagttcctccttgctgtagttctcttctttatattcggtataagacaaaaaagaatatctgtaatagtttattccacccaaaatagtataacaaaaatatatcacgctacagatcgtaactattcctagagcaccacgataaactaccatcctacgtacacctttactcatgataaccttgcgcacataataaacgatataaaatagaaaaagtaacacaaccaacacgacgagccattcactaacagaaaacttgacccaagaaggtacaaatcctactatttttgacaataacggatatacagacctactgtatttttccgcccaatcctgatggttctgcgcgtattttgtcagtatgtaagctataactccaagtgaaatcaacggtaatctcttaagtaaaagcttttttataatgtactccccctatccaacataaccattataatcagttattcttaatatatatcctgctaaagattcatcttctaaaggttttggagttagcaataacctttccaataagccatacctctccttcatttatttttttattatttcaaaataaaacagctaagaaaatataattttcttagctgttttactttctaactgattttgaaatctagtttaggagttcttgaaactattccgaataattatgaaaaatcacattataatgctgtcatttcttcgtgctcgtgttcatcctgcacgaataaaatacctaattcatgatgttcgccttcataggacgcgcgctgatcaaaacggatctcaccgttcaggccgatgatctccatttttacaaatgcgcggtttttttgaagtgcttcataaaaatccgatacatgtttcacggggatgccgtttactttcgtaataatctcaccgatcttcagctcaagatcgtccgcgggtgtattcggaatgatgccgagcaccattaagccctgatcccgcttagagaaataaaacggagccgcgttatcgttcagccgctgtctcaatgataaaaacaggcgtccgagcaccgcaatacaagcggcagctccggcaagcggagtccaccaaagggcagctgccccgaatgcggtcacgataaccccgagaatcatgacacgtttcgccgttatccttatgctgacttccggaagtgacccctgcacacgctgtccgaagccggcgatataaggaatccagatcaaatggaaagagccgcccggtacggtaaagacaggccaccaagaaaggtgtgactcaagcccgctgcccggcaccaataagaaaagcggaagcagccatgcgcgattcgccaattgtcggccgatgggcaggcctctgctgctgacgacaagcgccggagatgttttcagatgcgctgaacggcaggcagccgctccctccgtgataatcaaaaggcccataaacacggccgccgatgcccaattcacgccgaatgcctgcggaaaccgatccgcaaacggcactgtgtgggtatactgaaggataaacgcaatgaacatgccggcgctgacaatataagctgaggacagccaattcatacggaacgtcagcgaaagcaaagcagtcacagccgcgattatgccgagaagaccgaatggaatcgaaattccaagtccaaaaaataatatggagagaagaatacccggtataagtccttttatgtatgtaaagataagctcgtcatacatatccgcgatctttgtatgaaacgtatggcgttcacgtttgatccgcaaatatccgcatgcgagacttatgatgataaaaaaccagaacatcgggtgcaaaaaaaacagaccgatacttttcagaagttcaattccccattgaacagacactgctttcaccgcctcaagccaaacattttaattctattctaccaaataatcattggcttgaatatctcaaacgtctatctctcttccgtcatccacaacgttacatttgagagagagaaatctttcagatagtggtcaacctccacctcgatcacgccgctgatcagaagcatggaccgcttaatatccgtcagattgattcctaaacgtttatggtttttcattaagtaagtgaaataatgcttcgcacactcttcattgatttcgtgaacgcattcaacatttgtgtaattgaccaggtatctgctgaacagcataagaagacttagtgcttttgttgatgaaaatgtgacgtcttttgttctgtcttttagttgttccactaattcataatattttttttcacgcacaatacttgccctcttcaattgtgaacccccatttttttatccagataagcacgggtgattacagctgccgtgctgaagcgccgcaaacacttctgctttcgatactgaaatgcagctgccaaactaaaactgttctctattagaaccttcttttattgtaagaactaaaactgactgaggcaactttcaaaagtttcattttgaatacatattaaatcggcataaagtctctcttctctataaatatcgggtaatgtttgtcctttataaatgtttaaatgtgaaaatttttttaatatcttgtcaaaaccgtcataattatatgtcttttggttcactttttatgaatgacaaaagaaacaggagacgcaaaaaacgcctccttttcatttattttacaaataatgattttaacgccatttgcagctgcaaatcatttttttcgtcagatttcttttcattcatcagctgattcattttttccgctgtctttttatcaatgaccgctgttttatcaagcttgtaccggtcttgaaacgccagaacggcttttttcattgttttgctgaaatagccgtccgctctgcccgggtcgaagcctaggcctttcagcaggatttgggcgtgcttgacatccgcgctgttcatatcaggctgaagcggctgtttcagctgaagcggtcccgccgcaaaataatccggctggctcacagcgattgtcggagcaatgccttttttgtgaatccaattgcccttcggtgtcagccatttgtaaagcgtcaatttaatgttgctcccgtctcccataggcacggcctgctgaaccgttcctttaccgaaagaagtgtcgccgacaacgtcataatgtcccgcttcttttaacgcgcccgcaagaatttctgaagcggaggcgcttcctttatccgtaatgacattgacgggatacggcttcttatgttttaaggttgagaaatattgttttttatcgccgttacgctccgcaatttggatatacggcatgtcttttgtgatgaaatgctttaaaatttgttcgacgctttgaaggtagccgccgggattcccccttacatcaaggacgagaccgtcaatcccttgtttttcaagctttttcagcgccgcggcgaagtcctcggcggtatgctcggaaaatgtcgatatgccgatgtagccgacatgatgaccgcctgattctttgcgggaagcaaatacggtttcaagcgggatttccgctcttttaatccggaatgacagctgtttttcagtacccggacgctgtattttaatagaaaccttcgatcctttttttcctctgattttcagcacggcttcgtttatatctttcccgttcattgacacgccgtttatactgatgatttcatcattcggcttgaggcccgctttttctgccggagattgcttaaacggtgatacgataatgattttattgtctttcataccgacttcagcgccgatcccttcgaaagaagaatcaagagaatcggaaaactgcttagcggtctgcttgtccatataaacggaataagggtcgtttaatgtagacagcatcccctgaatcgctccttcaagaagcttttctttatctacattttccacgtattcgttcgagatcagctcatatgctttttcgattttttccattgcccgggttctttctgcgtctgatgaattcggctgtgccgccccggcaatatgggctccgccgcacatcatgcttagggccgctatcactgcgatcattttctgcttcatcgtttacctcctcttagtcctttaacgaaaacctggagatagtatgtgtaaattgcaaagaattcatgtaacggcaacaaaaaaatgaaaaagcgagattgtttcatatatatgggtaacgtataatattttgtatgcaattcattaaatatacaggagaatgcgatatgaaaataaaattatcgattttatccgcggcggttctggccgcaggcattaccgcctttgtctggccaaaaacagaggccaatgagaaagcgcagacggacgccttgtatgtttctcccgcaggcagcgaccaatatgaaggaacgaaagaaaagccgttccgcacattaaaacatgcggctgaaaaggcagaggccggaacaaccgtattgattcgggaagggacgtacgatgaaacgtttgaagtaaagcacagcggcacggccgaaaagccgattacatttcggaactatcagaatgagcatgtctcaatcagcggcaaatctgcgccaaaaagcgattctgaaactccgttaattcaaatccgcaataaacagtacattaccattcacggcgttacgcttgagaatctctccgtatcatcagaagatgcgacggccatggggatctgcgtcaccggatcaagcagtcatatcaacattgacggcaaccatatccggaacattaaaaccacggctgatgaaggaaatgcacacggcatcgcattttacggcacaggtgccatgaaggatgtcagcattacaaataatacggttgaaaaactgacgctcggcgcaagcgaagcggtcgtgctgaacgggaatgtcgacggatttaagattgccggcaataccatccgggacaataacaatatcgggattgacgtgatcggatacgaaggaacgtccaagcaaaacgactatgcgcgaaacggcgtcattgaaaacaatacggtgagccataactcttcttacggaaatcccgcttacggagatgaatattcagcgggcggtatttacgttgacggcgcagaacatgtggacattaagaaaaacaccgtttacaacaatgaccttgggattgaagccacctctgagcataaagggaaatacgcacgagatatccggattacggataacaaggtgtacggcaatgcatacaccggtatttcaatcggaggctatgacacgaaacgcggcggcaccatcaattcggtgatcgctcacaacatcatgtaccgaaatgacacgaaggaccttgacggcggccagctgctcctgcagtacggcacaaaagggaacacgatcgaaaaaaacatcatgacggcaagcgattcacggatttttatcgcaaatgattttacgaaaaacgaagaaaataccgttaatcataacgtctatcacaaagaagagggaaaagacggcatctggaattggaagaacagagaatatgattcattcacagcgtaccgaaaaggaacggcaaacgattcggattccatttatgcggacccgatgtaccgtgacgaatcgtcttatgactttacattaaagcccggatcaccggccctgcccgtcattcagtaacgaaaccattaaaaaaagccagtctgtatcagactggcttttttatttatacacgaaggaatttccggatggaagtcagacttccccatactccgatcaccgcgccgatcagaatgagcacaagtgatacttgaaacacaaacggactgtacggcagaagtgaaacaaatgatccctgaactttcggggccacccaagcgaccatcgactggtacgtactcagcacgagagcgatcggtatgacagaaccgaatacccccagcagcagcccttccaggaagaacggccagcggataaaccagtttgtcgcgccgacaagcttcatgatttcaatctcttttcttctggcgaaaatcgtgattttaatcgtattcgaaattaagaacatcgccgtgaacagaaggccgatgattaacgcaatcccgatgttgcgtgacaccccgacgatcttaaacagacggctgacttcttctttcccgtatgtcactttatacacatgatcaagcttctcaatttttttcgcaactttcggcgtatcatgcggatctgtcgttttgacgataaacgcgttgttcagcgggttttcctgatcttgcattttcatggcctttccgctgtcgccgaagcttttgaccaattgatcaagctctttatctttagatgaaaactctacgctttggattcctgaaatgtcttttatctcattctgcagcgtatcctgcgttttcttatttgacgtcagatcgattaatactttaatttccacttctttttcagcatttttagccatgttgtttaaattcagcataatgactaaaaacacgccgaccaaaatcaatgtaacggtaacggcactgatggatgcaaatgtcatccacgtgtttcttccgagagatttaaaactctcacgcaaatggcgcccgagaattttaatcataagaaccatactcccctcttgactcatcacgcacaataattccgtcttcgatcgcgatgacccgtttcttcatggtgtttactatttctttattgtgtgtcgccatcacgacggtcgttccgcggttattaatctcttccagcgtcttcatcacttcccatgatgttaccggatcaaggttgcccgtcggttcgtcagctatcacgacgtcaggattgttgacgatggatcttgcgatggaaacacgctgctgttctcctccggaaagctggtcgggaaactgccgcgctttatgcttcagctgcacaagatcgagcacttcgagcacgcgttttttaatgactgactgctgctctccgataacctcaagcgcaaacgctacgttttcaaataccgtcaatttaggaaggagtttgaaatcctggaaaacaacacctattttacgccgcacgaaaggaatctctttttctttcacagccgcgagatctttatgattaatcaatatttgcccttttgtcggtttttcttctctgtaaatcattttaataaaagtagatttaccggctccgctcggtcctacgacatatacaaattccccgggatgaatcatgactgacagcccgttaatcgcttttacaccgttcggataggatttatatacttctttcatctctatcatgaaatcacctaatcttttatttatgtcttgcagccatagagttcgcaaacatacagcggtttatggccgattcgtcaggaaacagatgaaaaatctgaaagttccttttcctcagtacacttcattatacgtcaaatttagacatattactattacagtttcttttcattcccagaccgagaaaaaaccttgcccctataacaggcaaggtttttctgttattttttctgtgacagccattttgcgatcttcacggcttcctcatcatttacaagatggctcggcatattgccgcgtccgtttttaatgatgctttcaattttagcttcatcatacttcccgccgacttcctgtaaattcggacctccgccgccttctaggtctttaccgtgacagccgatacagctttgctgataaagttcttcacccgctgacgcagatgcttttgatccgcctgagctgtcagagctttcttttttcgattcattggatccgccgcatgccgccagcaggacggacatggtcagaaccagcgccagcagcgcccattttgatttcatatgtaagatgcaccccttcgctattataacctcgtttacgcgcgtttgaaaccctcgccgagcacctcgcttgcgtctgcgacaatgacaaaggctgactcatcaatttgtttgacgatttgtttcagttttgtgaattcggtctgaccgacgacacacattaagatcggccggtcatgttccgtatacccgccgactgcggaaatcttcgtcacacccctgtcgatttctttaaacacagctgatctgacggcttcttcatgctgcgtaatgattaaagccattttggagcggttgaacccgacctgcacgacatcaatcgttttgcttgaaataaataccccgagcatcgcatacagtccctgctccactccgaaaacgagcatcgcgctcagcacaattaatccgtccatgatggcaaggcacgttcccagcgacagccccgtgtatttgtgaatgatctgcgccgccagagccgttccccccgtggagcctttgccgagatacacgatgccgattcccgttccgatcccgacgcctccgaaaatcgccgccagcagttcatgggtcgtcgcggcaggcagatctcttgttaaaaagacggcaagcggcagaacgatggaaccgaccagtgtcttcattccgaacttcccgccgagaatgatcactccggcgataaacaaagggatgttaataatccactgcacataagccggttcaaaaccaaacgtttctaaaatggtgctgatcccgcttactccccccgctgctatacggttcggcagcaaaaatacgttaaacacgacccccgtaatcgccgcgccgatcatgatatatatgtaatctttgatcagacggagcggcttattgtgattcacatccatgcaaaatcctccgttctccgattttctctcgatagcattttaagtcttcccggcttagaagtaaataacagccaaataccgtattaatttgctaaagcgctgttgtgaaaaatggaaaaagagaacggataaaaaaacacaccttgccaaaggcaggtgtgttcccggattacgacagtttagaacgtaaataggcgtcaatgaagatatcgatatctccgtccataaccgcctgcacgttccccatttccgtattggtgcggtggtctttcaccatggagtacggatggaagacgtacgagcggatttggctgccccagccgatttctttctgttcgccgcggatttcgtcaagctccgcctgctgttcttcaattctgcgctgatacagcttcgctttgagcattttcatcgcccggtcgcggtttttgatttgggagcgttccgtctggcatgtgacgactacatttgtcggcaggtgggtgatccgaacggctgaatcagtcgtattgacgtgctgtccgccggcaccgctcgcccggtacgtatcaactttaatatcttcggtacgaatatcaatgtcgatttcttcattgaattcaggcatgacttcacatgacacgaatgacgtgtgacggcggcctgatgaatcaaatggagaaatccgcacgaggcggtgtacgcctttttccgcttttaaatagccgtatgcattgtggcctttaataagcagtgtgactgacttaattcctgcttcatctcccgggagataatcaagcgtttcaactttgaagccgcgtctttccgcccagcgggtatacattctgagcagcatggaaccccagtcctgggattccgtaccgccggcgcccgggtgaagttctaaaatcgcgttatttttgtcatatggttcactgagcagcagctgaagctcaaattcattcaattccttcgttaatgacttcagctctttttcaagctcttgctgaaggtcctggtcaggttcttcttttaaaagatcatgtgtcatttgcagctcttcgtgagactcgctcagctgatggtaggagttcacgtattctttcagaccgttcgcttcgttgatgacggtttgggccttctgctggtcattccagaattccggttccgccatcttttcatctaattctgcaatgcgggcttcctttgattcgaggtcaaagagaccccctgaagtccgctaaacgagaagccatattttcgagctctgccctgatttctgataattccattccattcacctcattaaaagatccggggcgccataagacgcagacccggtcatgttcgcttcatacagtcgagactattctgtccggccgcagcaatttttatatttttttccgcttccgcaatggcaaggcgcgttgcgtccgatatccacaaccttgcggaccggcgcttttttcgcttgtttggcctcatcgccgtcctgcggctgatgagccgtcgtttggccctgaacaacttcttcgcgttccagattgctttcaatctcggccttcatgacgaatttcgcaacttcgtcctcaatggactcaatcatgtgctcaaacattgcgaagccttccatttgatattcacgcagcggatttgtctgcgcataagcgcgaaggtgaatcccttgacgcagctgatccatcgcatcaatatgatccatccattttgaatcaacggcacgcaatacgatgactttttcaaattcacgcatctgctctgtaccgaaattctcttctttttcattatattttgtcatgatgcggtccatgatcatctcatgcatttcatccggttcttttccgaagatatcgctcttttcaagcgcgccttcatcaagatacgttgaattcaccagctccacgaggccgtcaagattccattcttccggaagctcctctttcggcgtataagcggcaatcgcacgctccagagaagacttgatcatgccttccacaatgtcgcgcaggttttcagagtcaatgacttcaaaacgctgcttgtaaatgacttcgcgctgctgacggagcacgtcgtcatattgaagaagctgtttacgtgaatcgaagttgtttccttcgacacgtttttgagatgattccacggcgcgtgacaccattttgctctgaatcggcgtggagtcatccataccgaaccggtcaagcatcgccatcgtccgttcagctccgaaacggcgcatcaattcatcttccattgaaagataaaattgtgtgatgcccgggtctccctgacgtcctgaacgtccgcggagctgattgtcaatccggcgggattcgtggcgttccgtaccgacgaccgcaagaccgccaagctcttttacgccttcgccgagtttaatgtcggttccgcgtcccgccatgttggtcgcaatcgtgacagcgcctttttgtcccgcttcttcaataatctgagcttcacgctcatggtttttggcattcagtacctggtgcggaatccctttattcttcagaagtttagaaatcaattcagacgtttcaacggcaaccgtaccgacaagaaccggctgtccggtcatgtagcgctgggcgacatcctccgccaccgccttgaatttcccttccattgagcggtagatcaagtccggacggtcgtcacggatgaccggctggttggtcgggatggatacaacctgcatgttataaatattgcggaattcttcctcttccgtttttgcggtaccggtcataccggccagcttctcgtacatacggaaatagttttggaacgtaatcgtcgccaatgtcatactttcattttgaatctccaggccctctttcgcctcaatcgcctggtgaagaccttcgctgtagcggcgtcctttcatcagacggccggtgaaggaatcaacgatgacgacctggccgtcctcaacaacataatccacgtctttctgcatcgccgcatgggcttttaaagcctggttgatatggtggttcaaggccacgtttttgacgtcaaacaggttgtcgatgccgaacgttttttcagccttcgtcattccttcttccgtcagctgaacgcctttcgttttgacgtcatacgtataatcctgatctttcttgagcgtgcggacaaacgcatttgcctgcacgtacagttttgtggacttctgagcttgtccggaaataatcaatggcgttctcgcttcatcgactaaaattgaatcgacttcatcaataacggcaaaatgaagcgggcgctgcaccatttgttctttatagagcaccatgttgtcacgcaaataatcaaagccgagttcattgttcgttgaatacgtgatatcggctgcgtaagcttcgcgtttttcgtcttttgacattgaattcaggttcaggccgactgtaagcccgagaaacgcaaagatttctcccatttgctgggcatcacggcttgccagatattcgttgaccgttacgacgtgaacgccttttcccgtcaaggcatttaaatacacgggaagcgtagacgtcagcgttttcccttcccctgttttcatttcggaaatgttcccctcatgaagggcgatgccccccatcagctgcactttaaacgggaacatgccggttacgcggcgggaagcttcacgaacgacggcaaacgcttcgacaagaaggtcatccgtcgtttctcctttttcaagccgctctttaaattctgccgttttatttttaagcgcctcgtcagaaagattttcataatctcctcttacggcatcaatgtcatttgctattttttcgtatttgttcagcgcacgtttggtcggatcaaacattttatttaaaatcccaagcatctataacgctcctctatgttcacatgcagattttgcatggaataaatgataattttctgtccatgtatacctctcattatcataacataccttttgctatttccaaagaatttgcagataaagatagagaaaaaccttccgcgcgttcacggaaggctgggtgggtttattcagtcggttcaattaatccgtatttgccgtcatttctgcggtaaacgacatttgtgagattcgtctccgcgttggtgaatacgaagaaattatgtccgagcatattcatttggagaatcgcttcttcattatccatcggttttaaattaaaacgcttttgacggacaatttccgggctgtcatcttcaatttcgtcctgaaccgctacgcccgtatcagcagcgctgccgttctcgaaataatgtttcggaagaccctgctcgcggaattttcggttgacttttgttttatgctttcggatttgacgttccagcttgtttgttgcgagatcaattgcattgtacatatcctcgttatgcacttcagaacgaagcgccagatcagtcatcggaatggtgacttcaactttggattccttatcgttatagaattttaagttgacgttcacatcggcattgacgctctgctcgaaatatcgttccagcttgccgatttttctctccacatgatcctttaacgcaggtgtaacctcaatgttttctcctctgatattgtagttcatcaaagaacgcctccctttatctaaggatatgtaactatttctcttttaccccttctgatccctgctgaaacgttaaaataatgtgtaaattcggtgaacgatgacgaatggtgtcggttttatccggcagcttccggcaggattataagtatatgcaaaggacgcaggcaaaagacctgccgcttgcagcaggtctagtgaagaacatacggtttgatacagtcgtgcgtctgctccatccatagcttataatgcggcagaaagatggtttttaaaaactcctgaaaaggggcggacgggaaatcataatcatttaacatgctgaaatcctgaaagatctcgtcaaatgagcggatcgccgtctccacgcatcggcactcaatgatagacagcagaagcgcatgagaggaatcgagatgaaaaaaagcctgaatcaaatcgttgtaaatccgctcgccctccgtcttaaaaaaatcatcctgcgtgtccaacaggtagcaaagcccctcatcaatcgtaaaaagaagctggtaataggctgacaccaaatggtaatcgttcaaacttctcaaaacactcacctatttgcgtttgtcgtaataacggccgtcacttgtcgtttgctgatacggattgaaatacgtattatggtagattcgttttttcttaagcgtttttatttcatttcggataccatcctgaatccgtttcacttcgccggtaatcagacggtccatcgcggccacctgctgaagcagcgttttttcttcttcggaaaaaggcggctttatgcccgcaagcatctcctcccttttctccgtaaatgccgtaacgctgctgatgagaccgtcgctttccggggcgtccttcagtgcggcgtacatgttcttcgtttcgttatacaaagaaaagacattgctgttcatcaggcaaggccgcccgcgccatggctgtttttccgttcactctgcatggcctgcttccacgtgtcgcgaaattcagtaacgagcttttccgcttcatctaaaaactctccgttattctgcacgttcgcgtcgatcagccggcggcggatgtaatcataaatggatgacatctgctcggaaatctcaatctcccggtttaacgtgatgctgagctcttgaatgatgttttgcgcctttacgatattttcatttttggcttcaaggttgttttgcttcatcgcctgccttgccagcttaatgaatcgcaggcagccgttataaagcataagggtcagctcttccggagcggctgtaaagacggatgtctgctggtaagcagcaaaaggattatttattgccatttttataaaacccccaaggttatgaagttgaagatcctaacattgacgtgagatatgaagattggctgttcaatttctccaatgccgtatccagtgcgctgaactttttataatatctcgtctcgatgtcatccagcttcgttttcatattggaaatatttgtttctatttcatccaggctttttccgatggcaaagctggttgataccgagctttccgtacccgcctgttttgaaatttgaatctgcattttgtttaatgtgtcttttaatctccgggcaatcccctgttcctccgggtttttggttttcgctgtatcagggctgtctgcattaaacagtttagccacgagagcaggattctcggtaattttctgtttcagtttcgcttcgtctttaatgacaagctttccttgatccgtataactatcagacgtctcaattccgaaatcggcaagctgatattttttcccgtcaatcgtaaccgttgagtacagatcaagccgcatctccgccaaaccgttctgcagcgtgctgtcgctccgtaataaaccgcttttggcttttgcctcccactgctcaatctgcttatcggtcattgcttctctttgttcatcggttagcggcttataatcacggtattttgattctgtcaccttctcatttgcgcttttaattaacgtattgtatttatcaacgaaatctttaatgttgttaaaaatgccgtccgtatcagtcgtgctgttaatcgtaaccgttttgttgctgtccgtcacgctgttcagcgtgtatttgatgccgttgatcgtaaagttatttgacgtttttgtcatttcaagcccgttgaacgtaaacttcgcgtttttcccttcggcattggccgtcagtgcatttgttgcatcatcaacggcaaaaccgagctgatctttcagaaagcttttggtcgcgtcatcacctgctgaaagggtaaacccttcccccgttttattggaagtgaacgcaatcgtgtccacataatccgagccgttagagattttctcttttaaagccgtcactccgagacccgagctgttcagtttagaaatgacatcgtcaatcgtatcggttgcggcgatcgtgacgtttacctcagtcggcttcgtttcccccggatttgtgacattgaatttcaatgtttggctttgacccgaagtgaaattgatggcccctgatgatttataagtcgtcggcgtagccagctgctgtacagacatgctcgttgaaatattctgttcggcactgacggccaccgcgctgacactggaatccgaacttgttactgtttttttattccagtttgtggacatcagcatattattaaatgtagtagaatacatgtcggcaatctgggtattcatttcccgataagcatcgcgcttccattcaagcgtctgcttttgctggtttaatttattaagcggctgcttttcggcatccatcatttttttcaccagagaatctacatcaagaccggaattaaggcctgtgattcttgtgaccatatgtaccctctccttttcggcgtttagtcgtagacggctctatgacaacagtgagtttccgactgtttatcatatcacagctccataaatgtatgatcttattcttatatcggtcatattaaaaggttttcaataatttaactgcaaaatataatgtttcattttgtcaatagggttctttggcttgctgaaggaggagttagctgaagaaataaaaaaaagaccctggagaaccaggatctttccgtcattaacctttaagcaattgaagaacttgctgaggctgttggttagcttgcgcaagcatagcttgagaagcctgagtaaggatgttgtttttcgtgtactccatcatctcagaagccatgtctacgtcacggatacgtgattcagcagaagtcaggttctcagaagaagtaccaaggttgttgattgtgtgctctaaacggttttgaaccgcaccaagtttagcgcgctcgctagatactgtgtcgatagctgttttgattgttgtaagagctgaagacgcagctttagctgaagaagagatgtcgataccttttgttactttagaatctgcagctaatttttcagatgcaataactttaccgtcagtatcataatagccggctgcttttgtaaccttaccatctggatctgttacttcatccgcccaagtagcagtgctttttccgtcagttgatgtcaatgtattttgatcattggatactgtataagtcgtaccaactttcaggctttcagagtccattttattgatagacaggctcattgtttggccttcgttagctccgatttggaacgtcaggttttgcgcagttccgtcaagaagtttcttcgtgttgaactcagtgtcagtagagattcttgttacttcagacgctaattggtccatctctttttgaagctcagaacggtcagaatctgtgtttgtatcgttagctgcttgtgtagcaagctcgctcatacgctgaagaatgctgtgagtttcgttcaatgcaccctcagatgtttggataagagagattccgtcttgagcgtttttagacgccatgtctaaaccgcggatttgagaacgcattttttcagagatcgcaagacccgcagcgtcatcaccagcgcggttgatgcgaagacctgaagataatttttccatgttttttgcagcagagtttgaacctgcattcagctgacggctagtgttaagagccgcgatattgtggttgattctcattttgtatttcctccctgaattgtttttcgcacgtccttgtgcatttgcgcagcgtcatttctgaagaaaatttttcctctcattggctacaatatatatatcggacggccgcttccattgtttatattgaaaataaaaaaatcctcactttttttgtgaggataagttaagtaataaatcagtattaaaagatacggctctgttgttctcttccaggatcgacaagtagatttctttccggtgaatatctacgtgctgaggcgcttcaattcccagcttcacttgttctccttcgatagcgatcacctttatttcaatatccggcccgatctgaatggactcattcacttttcttgagagaactagcatgatcctcctcctatcagatgttttgtttcataggaagcatcatgtaaaatgatttgtttcgccttcatttcctttttattgacgataatcggcgcttttaaattggcggtcgtgttttcaaaaggctcttccagcgttaaaatcgccatcacttcgacgtcctctatatcttcaatatgcaaaagctcaagcgtcgcttggtcaatgtcaaattcgtaccctttaaagaaaataaacggactggcgacaataaaggcgatgtgctcctgtttcacagactgcagcgccaaaaacggtgaatcttccgacaaaggaagaacaacaaattgagtctcgtcattaaatcccggcaggccgttttcaaatgagataatctgcccttcatctattctgatttctccgtgatattttgttttaattatcatccttcacaatcctttaccactttcatcttttattctgcgttgccatcatcaaccgaaatcgtcaccttagggtcttgcatcatatcaatctgaactttccccggcgtataattccatacaggtttattgacagctgcttcaattgaaggtttgcgggcttcaatatcaatcgtaagctttgaaggaatgcagtcaatgtcgacgagaaactgcgcaggcagaaagtcgctgaattcgccgaatggatcgggcggactgacatctgctgcctgccgggccatcacattgcccgttttcttttcgatagccgccatttccttcccttccctgactgtttttgcgataaactcgctgcaggcttccgcacctttttgagcggcttcagcgttcagcttttcaaatgatttgagattcaagttctcccacgccctcgtctggtcaatcgtcagtttggccggcgtgctttcgatgttcagctctgccggcggctgctcgatttccaggtcagcgggcggctgttccatctcgatttcttccttttgaaaggttataccgattttagcaggcacactgtcaataatcaatctcggcatctgcacagagatccctcctgtttatagtattttagtaaaaaaagcgatctccctgttgtgagtcgctttttttatatattgaagacgatagttatattatttcaggaagtcgatcagtgacggctgaatgatattcgcattcactgacagcgctgctctatgaaccgtctgttgagataaataatcaacaattacatcttccatttctacatcctcattatccgacaatactttttcagcggttgccgcttgtgattccaatcttgtctgaatgagttccaaccggtttgtgcgtgcgccgatattggatttttcagcattcattttgtcagtaaaaccgtcgatatctgacagaatttgatttgaatctgcttcggacagcgtgcctttgcttaaagaagcttctaaggagttgagaaattcaaatacattatctccattttgtgcgacgcctccgaaagctgagtttggatcagaattcactttcagcactgctccgtttgagatgttgatgttaacatccgaagcaccggtataattctcatagttgtacgtatatgtgccgtcggcattttcagtgatcggcgggacatctgaattcgttccgttaaacagataacgtccgtttacctgagtattcgcgacagaaacgagctgctttttcagctggccgatttctgtaccgattgctttcaattctgtttcaccgttcgaatcacttttcgcctgaaccatcaagtcccggattttccccataatatccgtttccgagtttacgcttgattccgagttttccagccatgtaaaaccttgcgaaacattccgttggtactggtttacctgcgcaagctgagtacggtactgcattcccttcattgcgacgaccggatcatcagaagctttcgtgatttttttccccgtagacacttgctgctgaagccgatcgagcttgtcataacttgagccgataaatcgaagagaattttttgcgatcatcccttgagttactctcatttacttatctcctatcttcctccggtgcccataccgttaataattttatcgaatatttcatcctgcatcgttatgatccgcgcagccgcattataagcgtgctgaaactgaatcatatttgtcatttcttcatctaaagacactgcactgactgattgtctccgttcatcggctgaaagggtgttgctttcagagttgttcataagattagccgctttttgtgaattaacgcccagctttccgataagggattcataaaagtcattaattgtagtggtttcaccgttaatagtcagcttgctgttctgtacggctgcaagatttgtcgcgtttgtgccgtcacttttttctccgtttaacgacgctgcgatattatcagtagacgcaaggattttgtcactgacttttattttcgctgccgcaccttttgccggcaccgcttcatcaccgctgaaatcaaaaaatgctgcaccctgttcgcctgtataggtcttccctttttcatgaactgcattaaacgcgtcagcaaaggatagcgccatattgtcaagagccgtcagcatttcaggataaagccctttttcttctccgtttgacatatagccgtatgattcaataagacctaaaagtgagccttttccggtaaatgcatccgcattgaccgtactgctgccgactgacacactcgacacgagtccgctgtccttgtcgtagttgattttcatttctgaaactgtttttgtgttaccgtcgagcagcgttccgagagaattgttgttcccgttcagcaattcgacgttaaccgtgccctcagcagtcgccaaggcatgtccgcccgacttattatatgaaacttttatatttgccatagaagataattgatcaatcaatctgtctctttggtcatacaaatcattagggagcataccgctcggctcaactgccgctatttgattgttaaggtcattcagctgattgagaatggaattgacctgatcagctgtgttatccaggttctttttaatatcaccctgaatgttagtcaaagaggtagatatatagttaaaactttcggcaagagatttcccctgctcctgcaaaactgagcgcgctcccgtattttccggattcgtcgccagatcctgaagggcattccaaaatgaactgagcgatccgtttaatccgttattgtcaagctctttcatgacgccttccatttgcgacaatgaattggaacgggctgtatagtaccctaattttgtattttccgttctgtactgatagtctaaaaaactgtctctgacgcgctcaactgaaccggcttttactcctgttccgatttggccggccgtcagatcactgttttttgatactgcgggataagggctcgtcgattgtaatgtgacgcgctgcctcgtatatccttctgtatttgcatttgcaacgttatttgaaactgtgctcaatgcagtctgctgcgcactcaatgcacgccttgctgtttcgagccccataaaagtcgatggcattgaaaatcctccgttctaagcttttgaatcgaataatgtcaaacggctgacaggcttgcgcgccgcttgcggctctttataattcatattctctttttcacccggcatgatcatatcgaatgccccggagatgaattgtaaagcctgaatcgtgagctgtttgttcatctcattcacttctttcagacggtcaagaagcgcagacagagagtgaaataacccttcaagctcctgtttttcactgcctgaagttctggagatgcatgcagcaattgtattgtcctcaccgcggctgagaaactgagaagttaacctgattcgttcttcctcagtctgcccgattgcctgaatatacttttgctctttagtcaatatgttggagagctcttttgttttacctgctttcagcgcttccgttttctcctcagacagcgtgagcagatgttcatgcagtgcgcaaagtcgcttcagttgatcaataattggctttgcagacattgactttctcctttttattgctttttataaaaattcactatgttttcagcgatgctgtttgaatctattttatatgttccgctctctatatccgctttaagctgagcgattttttcctgacgtgttttagtgaccgcatctgacgcattttgaagctcttttgcatgagaagaaatttccactttgtccttcggctttgcagcctctttttgtacggcttgcttttcgtaatttttttggtatggattaacggattgtgttccgtactgattgattttcataggattcctctcgctttctgttcgcagtctaattcttttatcgactgcgttatcagttagtttagggaatcaggtgtttttggtattataggcatagtatgtgtcttttgtactgtttttttctttgaattcagcggctgttttttggttcatatggtctaattgcgactcaatatctgtctgacaggacttgcaaaattttcctgtcctgatcggatttccgcacctttcgcaaggatatgccaaattcggaagctggctgatctgaatccttttttgtttgataaacttgaggatcagctcttcatccacacctgtttcctcagtgatctgctgcatcgtcgactgtctgttgatctgctttctcaaaaaattatagacggtttcaaatgctttttcttcttctttaatacatgcctggcacacggtctgcaggttcgttttaaaaaataaagcattgcattttggacaattcgccaattcacccatcgtattaactcctattccttctttaatctgccttatatttctatcaattatatcggcagaaaaaaagaatgatttagctcctgattaaagtaaaagaggagaccgatgacgctttacccgctgtcagcaggacttcggcggcttgatgcagtgtggcgcccgtcgtataaatatcgtctattaagatgacgttcataccttcggccgagttttcggctgctgaaaactttttttctgcggacagcctttctgttttgctctttttggattgtttttcattgttcagtcggatgagggggaaaatgacgggcattccgagcagagaggccagcagctcggattgattgaatccgcgttccgccagccgttcgccgctcagcggaatagggatgagagtatgtgtatttgatggatatgccgctttaaagccggcagcaaagtcacgtccaaatgcttgaatgattttcgcatcacccctgaatttaaaccgggctaatgagtccttcatcgcatcattatacaaatataccgaacggttttgccgcagcaaaaagcgcttttccgtttttgattcccgggccgcacaatcagcgcatttttcatttgactcctgaggcctcccgcatatactgcatacggggccttcaattttttcgaatcggctgctgcatatggtgcatacctcttgctcgggcgccagagaaaacaaagatctccaagtcaatgaacttgaaattggtgagtcacacaataaacaattcagagatattacgctccttcccaagtttcacagaactcgcttggattaaccgaaacaatcgcggctgattcagccagaatgacaagcagcgccgtatttttctgtttatcaactatctctgcttttgcataagcaactttctttttatctgtaacatatgccggctcagcccggtttaatgaaagtgccagtacatcatttttgcatacccggcatgtgcatttcatatgaagcttaggcatatggcggtcgagaagttcctttaatatgatttctttagaattgacaagcatgctgacagctcctcataggaaagtatgagtatactgtatcatgttttctgaaattaactagtccaacaatttacttttttgtgccaatttgttcataagttctatatgtttttttgcttttttcattccgtttgtcattccgaaatgaaacaggacgacatcaccgctgaaatgtttataatgccttcccgttctgcccgcgatctgtacgagcgcgctctcagtaaagataggtgcttctgcgccgaggacacatgtctgaactttgggcacggtaacccctctttctaaaatcgtagtcgttaccagcagatcaagccggccgtctctgaatcgtttcactttatcctttctgaatgtgtcttccgcatgtacgccttctgcccgtatgtttaatttctgaaaataatccgttgtctttttcaatacgtgtacagacggaacgaataagaaaaccggcagctgtgattgaagtttttggcggacccaatccgttacagagcgcggcagttttcctttctgaagcttcttcttccaattgccgcaccacaaaaaacgcggctccggcaggggtttccgatgatatctggccggtatgcgaacgcttttcagcaaaccggcttcagcattcttttttaatgtgtctgaaggagttgccgttacataaacaagggcgctgtttttcttcctcgctttatcaacagcgaatcttaatgtctcatcggctgaaaaaggaaacgcatctacttcatctattatcatgacatcaaaaatgtctcggtagcgcatcagctggtgagcggttgaaatcatcagcggagtcaagcggcctttgtcctcgctgccgccgtacaaagcagaaacgtcgactttctcaaatgcttttttcagtctcggcagcagttcaagtacgacatctgtacgcggagtcgcgacacagacgcgcaaaccttgattcagggcaaactcgataccaggaaacagcatctctgttttccccgatccgcaaaccgcccatactaacagctcttgtctctcttttatcgcatctgtaagcgcggcggcggcctgcttctgtccgtctgtcagtgttccttcccaagaaagctttacaggctcccagctgttttcaggggcttgattccaagaatataatgatgtcagttcatcagcccttcccatcatgacacaggcacggcaataggtaatctgccttttggcagagggcgcccaaaatgccgcaaagcaggcttgatcagactgaccgcatcgttggcagacgtaacggtttttccggcggatgattgacggctcggccgttatatgctctttttctataaaacggttgatgcgctgatctgaaaacggtatctcagatctcaataaatgccggccgtaaaagaaatcccgcacctctgaaaattctgaagcaccttcggacatctccctgcctcctttctgttcaaagtatgcctgccgggaatttttttgtcgaatcacgaaaatttaataataaaaaaatctccgcccttgaaaacggagattttcacttagtttttaaagcaccagccgattccgatggcgccttcgcccaaatgggttccgatcacggcaccgaaatagctgttatagaattcgacatgaggatatttaccgcttaactcctgtataatatccgccgcttcttcttccctgtttgcatggatgacagcggcccgcatcgggattcctttacttgcatcctccccaaacagttcaaaaattctcgaaatcgcttttttgcgtgtccgaatcttttcaaaaggaacaattatcttattgtcaaaatgaagaataggctttacctttaacagaccgccgataaaagcctgagcactgcttagacgcccgccccgctggaggtgtgataaatcatccaccataaaatacgcacggactgtttttttcatttcttccagctctttaataatctcttccggtgagtcaacaccgtctttaatgagctgtgctgcctttaatgcataaaaaccttgcgccaaacagctgatctctgaatcaaagggataaactttaatatgatcaaccatagtgtttgccgaggcggcgctgttataagttccgctgattccgctggacaaatgtatgcttatgactgcgtcatatgttttgcccagttcttcgtacaatgcgattaattcaccgaaagaaggctgggacgtagtcggcagctcatcatgattttttacttctttataaaaacttctccagtcgagttctgtttcttcgcggaatgttttttcaccgaaaaccacttgaagaggaatcatatgaatatgatgttcttctctcatctctttcggaatatatgctgtactgtctgttacaactgcaatcttcatcactttacctgccttattaagtacttaataagtattttaatagatatgaagctgtaaaaaaagacttgcctattatggcaagtcttctcatacatgactaacgcatctctacccagccgtttttaatggctacgacaacggcttgtgtccggtcattaacgttcattttctgcaaaatattactcacgtggtttttcactgttttctcactgataaacaatgattcaccgattccgcggttgctttttccgtctgcaagcatttgcagcacttcacattcccgtctcgttaatatatgtaatggtctccggatttccggataaacctcatgctgaggatgagcagaaactccgcttgtcgcaagacggcggaattcgttgacaagattgtgggttactttcgggtgaaggtaagaaccgccctcggctaccactttcactgcttcgattaaagtatctgcgtccatctctttcaggagatagcctcttgcacctgtttttaaagcatgagtcacatagttttcatcatcatggatggagaggataatcaccttagattcagggtacagctcaacaagctgtttagtagcctctactccatttacattcggcatattgatgtccattatgacaacatcgggatgataatgctcgacgattcgagccgcctcatctccatcgtcaccttctgctaccacttcaaaggtaggttcaaaatccaatattctttttacaccctcacggaatagttgatggtcgtcgataataacaatatttactttagtcacacgctacgcctccttatcctattgttctatatacgccgctgttcggtcaatatgtcttttggctctatttaacaaattataggccgagagataacggaaccttaatcatgataaatgtcccaagacctattttagagtctatcgttatcgttccttcaagcagatctactctttctttcattcccagcaagccaaatgacttgtttttcttttgtttagcatccttaatatcaaagccttttccgttgtccttaatgataagaacgacaaaatcagcggttacttccacttttactgttatttcctctgattctgaatgtttgagtgcatttgtgacggcttcctgagcgagacggaaaagcgccacttcaaattgcggggcaagccttttgttctccgtgtctccgatacactgaaaatgtattttcacctttccgttgtattcttcagttgtataaagatattttctcagtgtaggaatcagcccgagatcgtccaatgccatcggtcttaaatcatatataatccttctgacttcgtaaagggcattccgcacattctgccgaagatttttgatttcctgaaatccgtcctccgtgccgcggtcgcggaagatccgttcaattaattccgatctcatcatgacatttgccagcatctgcgcgggaccgtcatgaatttctctggaaactctttttctttcttcctcttgggcttcaatgattcttaagccgaaatcttgtttagcctgcgcatcggcaagaagaagccctacttggcgaaggtcttgattcaggtaattcagaacgacggttatttggctgaccaatgattctgaccgttcaatgatttcctgaagccccaaaagccggcgttctaaatcatctctgcgctcccgcagctgcttttcacgctgctggatcatcgtcagttccacttgaagtttgtgcgccttttcataggcgttgcgaatttcttcttcgctgaacttatggaaatttctgcttacttcagacaagcggtttcgtgcgtgccgcgtatgaacttcaagtttgtcccccagctcaatgacttcgtacacctgctgtttgatctgtttgagttcttcaaccagctgctcatattgctggcgcgactgctctccgatttgaaaaacctcgtccttgctcccgtccacggttttcagcattttcataagtatagaatccaaaactttggagtccatcttcgatttattcatctgtctccctccgtaacggtgttgttatgtatttttattataaatgtaattgaactgcaatttatgtcgaattataatgaaagaatgcgtatattctagaaaaaaacatttttatatagtatcttactctttcatgataccaaaatatgcgcaaaaattctaaagtctgttcgaatttgtagaaacaagtcttttaatgcttgtcaggagggtccagcaatcatgctgcacagctatttaactgttaaagaaacgggtgaacatgagattgtgattgaaaaatcacgttttatctgtcacctgagccgtgctgcttctgaagaggaagcgcaggaatttatacaaaagataaaaaaacagcactggaatgcgactcataactgctcagcttatctgatcggcgaaaccgaccatatacaaaaggccaatgatgacggagaaccaagcggcacagccggcgtccccatgctggaagtgctgaaaaaacgcggtctgaaagatacctgcgcggtggttacccggtatttcggcggaataaagctcggtgcaggcggattgattcgtgcatatgggaagtcagtgtctgaaggcttaaatcatataggagttacggagcggaagctgatgcggattatgcatacatcagcggattatacgtggctcggcaagatagagaacgaactgagagaatcagtttttttactgaaagatatccattatgcggatcatgtcgaatttgaaacgtacgttgaagaaaaagacaaagaagcgtttctaaaatggatgacagaactgacgaacggcaagagtaagaatacagagggagaactgacgtatttagaaacagacgtcagccctaaaggagactaatgtaatggctgaacgtgtaagagtgcgtgttcgaaagaaaaagaaaagcaaacgaaagatcatattcaaacggattttgctgctgcttaccctcgttttgttagttgctgccggatttggcggatacaaagtatacaaaacgatcaatgcggcagataatgcatatgatgccctttcccgcggagaaaaatcaaaattgcgggataaagtcatcaatatgaagaaaaaaccgttctccattttgtttatggggatcgaaaattatgccaccagcggaaaaggcggacgatcagattctcttattgtcgttacccttgatccgagaaataaaacaatgaaaatgctgagtattccgcgtgatacgcgggtgacgcttgccggcgacacaaccggcaacaaaacaaaaatcaatgcggcttttgctaagggcggagcggatgaaaccgtctcaaccgtcgaagacttattaggcataccgattgataagtatgtcactgtcgacttcaatggctttaaggatgttattgatgaagtaggcggggtcgatgtaaaagtgccgtttgacttcgacgagatgagtgacgtcagtaaaaagaaacggatctatttcaagaaaggaaacatgcatttgaacggtgagcaggctttggcttacgcgcggatgagaaagcaggataagcgcggagacttcggccggaatgaccgccaaaagcaaattttaaacgcactgatcgaccaaatgtccagagctggaaatattgctaaaatcgataaaatcgctgaaacagcgagcaataatgtccaaacgaatatccgaatcactgaaggactcgctcttcagcagatttacagcggatttaccagcaaaaagattgatacactgaccataacaggatcagatttatatttaggcggaaccgcaactacgcgcggaacatattatttccagccggatccaaccaatctcgagaaagtacggcaggaattgcagaagcacctggattacccgtccggaaacagcacggcatccgatcccgcttctgacagcaccggaacggacagtacgactgattcaacttccggcagcacaggaacaggcggtacggctgattcgacttccggcagcacaggaacaagcggcacaaccgattcaaccaacggtactgcaggtgcaaacggtacggacagcacacagtccggcggcacaacaggctattaagagtaaacccgatcctttgagcaggatcgggtttttctatataataagagaatagcaaaaaagcagaccattcgcatgatctgctctttttaatttttctttaccaatcttttgtaaaacttggtaaatggtttaaattgttcatttactaaccctgtgacctctgctatgatttgcataaatacaatcaatacaaaaataataaacagcgaaagccaaatggtcgcgcttttcagcaggatggcactgacgctgaaaataaagccgattaaataaatgataatgacagccgtgcggtgtgacagcccgaaggccatcagccggtggtgtatatgtgacttatcaggcgctgagatcggctgtttgtttaaaatccgcctgatgacggcgaatgtcgtatcaaaaatcggcacgcccaaaatgatgatcggaatgatgatactgaataaagtaacacttttataaagacctaataatgagagtactgagatgacgtatccgagaaagagcgatccggtatctcccataaatatctttgccgggtgaaaattataaaataaaaatccgagtgtgcttcctatcacgacaagtgaaagtgacagaataaggattttccctccggacaacgccataacggcgatagtggagagtccgatgaccgacaggccggcagcgagtccgtccaaaccgtcaatcaggttcatcgcattcgtaataccgacgatccataacacagtcagcgggtaagcgacccatcccaattctaaacgttccgttaaaaacggtacggagaaaaagtccattttcagtcccgtgctcacaatcataatggccacggccagctggacgaaaaactttacctttgcgcttaattggtatttatcatcaaggattcctaaaataacaataataaacgcacccaccgtaatggcggtcattttcgtttcattatatatgccggccgcgagcacacccgccgctacgccgataaagatggccaagccgcccatacggggcattattttatcatgtacttttcggttgctgggctggtcaactgcacctattttgatcgcaattttttttacgataggagttaggattaaaaccgttagcagagagacaaaaaacgcaacaactatgcgaaacatgcgttcgtcaagcataaagaagtctcctttggaattatatgaagtcttttctgatattgaaccgttccttccattataattcttactagttattataacaagcatcatcaaaaagaaacacgcaaatcaaaaaatgcgctttcccttttaatgggattgcgcattttccaatatacccgtgcattcaagcattcggccgaataaaacattccaatcccgtccccgggccaattcacggcgcaaagcctcgtatgatccgcggcggtccgctgccagaagcgcttcgcaggccgcgatgaaatctgcggggtcgctcccttcaacgtattcataaacgtaaggccttttgatttttgacgtagaagaaaggttgcagccgacaaccggtttcccggcggctaaaaattcaaaaagcttaagcggaaataccgcgtcattataaggtgaatttttatacggcatgatgccgatgtcgacaagctgcatataggacggcacttcattcggcgcggcaggtcccgtccagatgacattcgggcgttccagaagcgactcgaaatccggatcgtcctgagccgtgttcgggcccaccaataaaatcgtccagtcaggccgcaaatctgccgtttccgccataagcgcaaaatcgagctttggtttgattccgccgataaaaccgagaaccgttccgtttcgtccccgtaaaatgtcttcatccggctgtttattttcccgtgaaaacaggtcatattccactccgttttcaatggtgaacactttctggtgcgggttctccagcttttttccgacctcccggtgcagacagtcagatgtgcaggtgatggaatcggcacgctgaatgattctcatttccgcctgtttaatgatgtttcttcttacatttgacagcacaccggcccggccgctgatcggagcggcccacagatcactgcaatcgtaaatcacttcatcccaaggaaacagatctgccagaagcgggaaaccggggaaggtgtaccataagcagcagcgggccccttctccttcttccttcagcatgtgcaacaatggtgaaagtttatgcctgtaacacatgtctgtatacctgccgaaacggaatgctttttgctgcatgagatcctttacagtgaactgccggattccctcggcgatcccggccatctgatcatcattggctcgcggggacgggcatacccaaatgacgcttttcgtttctttttgccgggcaagaaattcagccagccgatgccgtctgtatctcagccggtcatgcccccattccgccgctccgacgattacgtgaataatcggttccaccttcatcacccagctcctctgacgcctacagtcttttcaagaccgcgtttttcgcatattgcataaaacaccacgaagccttgataaaatgcaggcgctcaatttctctataaacaaaccacgttttttttgcggctttccacttgttgcttgaaatcgaattctgcacaagcctgtattctgaaaggcactcattcaggccgtaagccgtaaatccccttttcagcagggaaagccatgtcgctaaatcctgccgcgttctgatatcaggcatttgaatctgccccgtctgctctctgtcaatcatgaccgttaaacatccgataatcgtgttttttaaagcttcatcatatgacaggctttcaggggcttgaatcgttttgtccgtcggcgttccgtcctgctccatgacgctgtagcccgtaaatgaaaaagcgcaggaccgctctgccataaacgcaagctgtttttgaagcttttcctttttccatctgtcatcgctgtccagaaatgcgacataacggcccttggcatgtttaagggctgtatttctggcagctgcggctcccccgtttttatctaaataaacgacgcggatccgctcatctttttgttcatattgccgtaaaatatctctcgttccgtccgttgaacaatcatccgcgataatcatttcccaatgcgggtggctttggtgtaaaacggactgaatcgtgtcttcgatatattcacttgcgttataagacggtgtaatgacagatacgaaaggtttccagtttgtcatggtcacatctccatcgcagatttttacaaggactctctaaaaaactcaggaatgacaatgaacataaaggcaactgcaatgccgattaaaacgcccagaaccgctttctttttcggcggcatgccttgaccagccgtttcattcatcggctctgaattgatgacgccggccgctttcaggttcagctgcgtatttttcaattcgtataaaaatcgttccttatccactttggcgtccgcgctgacggtttctccttcaagcgcagcaatactctgccgcactacttttgcccgtttttcaaacaggtcctgatcattcttcagaaaagttgttatgacggcttgaaacaccgattcggtttcctgtttgttttggccgctgcagctgaccgtgatcaatgaatctgattgtgtttcgacagtcagtttacttttcacggccgctctttcttcgtctgttttatgaggcagagcctgctttaaaaaggcatcgctcgtcaaaaggagcgggatttcttttgtattgttataaagcggatgatcataatttcccgcggcgatcgcggcttctgatgtaaaactgctgtttccgctgatttttgacggcaatacatatcccgccgcccctaacacaacgggcagcgcaatgatccaaatgatattctttttgatacgccgggttattcttgtcaacatatccttcatctcgcatctccctgtttttcatagtacgccgtgacggcaggctccttttgtaaacgcctcaatatattgaccgccgcgatcacgagcgagagaaatacccagtggaaaaataaattcgatacggagcttgggctgatgctgcttaccaaaaaaccggccatcgccgtgataagtccttctgtgatcagtcttgactgattttccgattttctttcatgacatttataaagtgtccaaaaaaggaacaaatagactgtcaggtaaccgagcatcgtaagtacgccgaagttcgccataatctcgacgagccagttgtgcacctcaactacgccgcccgtatcataaacgggctccgcttttaaatagtaagagacgtttccggcacccactccggacccccaggaatcaattacatagtgaaaggcgttctttaaaagattcgccctggcgaggttggaaggaagcggctgctgtcccggcatcgcctgcggagctgaaaacagattcaagacggcattggtgatacggcccgcaaataaaaccgcaaacagcgcagcacccgctcccgcagcgtacagcgcgaattttttcaacagagaaggcagcaggatgaagacgtatacagccgcccccgcgcatatgcccagcagactcgcgcgcgaaccggtcaaaatgattaaatacaaagcgcagatcgctaagagcaggctgacggccttcacatagccgtttttcatatttttcaccgccgccgcatacagaaagaaactgatgcacaaaaacgtcgcgaaatcattttgattaaagaaaacggacgtcggataatgctgtttgtactgcgggccgttataaagcgtggagctcggcagatggttgtgtgtaaaatggttgtaaaagccgatcgccatcacaaaaatggtcatcacaagccatatgccgtaaaaaaccatcagctgatcaaagcgctgaatgaacatgacaataagataaatcaaaaacatgcccattcctattaaagctaaatatttaatcccgtacgtcacggattttgcccacaataacgataggagaccgtatgtaaaccataaggcgaaaaacatcagaaccccttttacattcacccgattccatctgtcaatatgatgacggtttgtcaggatgccggcgatgtgtagggcgcccgctccgattaataacagccggtatataaataagctgaaaaatccgagatgaaccgcaaagaaggcctggtttaaaaatgtacacgcgatcagtatataaatgagccccataaacatctgaccgtttgttgtaaaggcggatagcaaagcaagtccggcaataccgatcatggcggcaagcagcagcacggtgatttttccgaggccggcatccgccctgaccgcctccagcatgatgaatcctcctgtaatgacagcggcaagcagcacaagaacatgtgccgctgaacgtttgatactcacatggcaaacccctttccaaaaccggcagccgagccgggctgccgagagcctgaagacaaatctttttctatcttgccagttcttttatttgccgatcggcatgaaccgccggacgtccgacggaatgataagtgaatcctgaaaccctcatatactccaacggaaacatatttctgccgtcaatgatgaccggctgtttgagcagccgcttcactctctgaagatccatctccttgacttccggccaatctgttgtaatcaggcatgcgtccgcgtttttgatggcactgtacatctctgcgtgatattcaatgccgccttctcctaatatcgctgccgcttcgggaatcgcgatcggatcatacgctttcacgtgagcgccctgctctttaagacttgtgatgatatcaagagccggggcggagcggacgtcatttgtatgcggtttaaaggccagccccagtacggccacggttttcccttttaagggaccgatggcgcggttcaatttttccgtaatacggaccctttgcttctgattggtttcaatgacggcttccatcatttcaaacggatagccggcggcgtttgcgatatgcaataaagccattgtatccttcggaaagcaggatccgccgaatccgatgcccgcctgcagaaatttattcccgatccggctgtcaagaccgacgccttctgacacgtgagaaatgtccgccccgacacgttcgcaaatattggcgatatcgttaataaaagatattttggcggctaaaaaagcatttgcggcatacttaatcatttccgcgctttcaagattggtctttacgatcttcgtacggaacggcttatgaagctcttcaatgaccgaagcggcatgttcgcttgtggcgccgataaccgcccgctccatctgcatcgtatcccgcaccgccgaaccttcgcggaggaattcaggatttgacgcgacatcaaacggatatgttccctttgacgcttcgctgacgatttggtaaacgagctttcccgtcccgaccggaacagtgcttttggtgacaatgattttgtatccgttcagctgttctccgattgtttgcgccgctgccttaatgtaggtcagatcggcttcacccgtctttgacatcggcgtaccgacggcgatatagatgatatcagcggctttcacagccggctcaatatcggccgtaaaggataaccgcccgtcactgacatttttttcggctaattcctcaagccccggttcatatatcgggatgactccgttttgcaagcttctgattttcgcttcattgatgtcacagcaagtcacatgatggccgatttccgcaaaacaagttccagatacaagacctacataccctgttcctaatacagcgatttttttcacagcttcatccctctttcgaaaggttctcctcttgcccggaccggttcatgacggaccggtatttctctttcagcgctttcgcgttttggcttgcgtcaaaatacgtgcggacggtttgataaagttcctcggctgtttgcggcgtccaagcctctccttcgtcatattgcagaatggattctgccagcgtgccaggtgaacccggcttgatcagcaaacctctatatttcccaaataaagaagccaatcctccgacatcggtacagatcaccggcaccttcagagcgagcgcctcaatgaccacagtcggcatgccttcgctgtaggacggcagcgccattacatccgaggccagcagatagtcctgtaccttgtcgttcggcacttgccccgtgacgatatgagcggcttcacgcaatgaagatgcggctggaccgtcaccgacaaagacagcttcatatctttcatccaatgactgaacggcttttgataagtcgaaaacacctttctctttgacaagcctgccgatgaacacgatcagttttttatccggaggaaggccgagccgttttctgacggcttctttcgtctcgttcctttttcggaaggcgtcaagcgtgatgccgatcggaagcacgctgcactccgcttcgatgagctttttcatttgttcccgcagactgccgctcacagcgtaaatatcggctgcttcccgcaccgcaaatgtaaatgcgcgatgagcgcttttgctgtaatgcggatagacattgacatcactgccatgcaaggtcagcacatacgggatgcctaaagcctttgacacaatggcggccgctccgcctgacggcatggcgaaatgcgcgtgaatcagatcgggcttcaggccatgatttttaatttcggaaagaaccgatgacgccattcttttatgcggctgcgcccatttcagctgcccgggaaccgcctgataaaacggccggtggacggacacgcctttccgccattcatgcgccggccttatatccttttgccgatacgtctttttcagcacccggaatggcgcggcgagtttcggccggggacaaatgacagtcatctccgcgccaagctttctcagttcttgggcctgcgtctcatgaaaaacgccttctcccggcttctcactgctcggatatacacttgtcatccacaataccttcatagcaaacgtccttttcttaatttacttttcatatgcggataagcttttcctaacaggaacaaataacacaacgctccgcaggatacggagatcgccagccgcagcttgacatcaaggctgatccgctccgtcccgaagctggctgtaaaggcgatgacacccattgccgccgtaagcagaaacggtttggccacggctttgaagtaagccgacagccgcagcttaatgacatatgccagcagccagcgcccgatcaggaaattcaggatgctgatgaaagcgtacgtccaggctaccgtcaagagatttccggacagcacggcggcgtacaaagatgcaccatacagcagcatcaccccggcgtcccaataaaatgccagatcggcccgcccttttgccagcagcacagatccgttcggattcatcagaacccttaaaatcccgacgatggcgagaacgtttaaaaccgggacagccgccagccatttttctccgaaaaccgaagccacgaatgcatccgatactgaaaccaaaccgagcaaaagcggaaaggatatcagcgcgagtattttggtcatattgagaaaaccttctctgatcacgctgttttcatgcttgtttttcgcaaagacgggaaacgcgactctcgtaatgatcggattgatttttaataccggaagcgtgacaatctggtaggccagattgtaaatgccgagcgcctcggcgccgataaaactgccgatcagaatcatatcaatattcgccccgagccggttcacaagccgggaagacagctgaaaggctccgaaagaaaagaagcctttcattcccttcagatcaaaaacgaacaccggtctccatgtttttctgcaggacacccagtacagaataccttttgacgattgcagcagcacctgggaaatcacataggcgagaatcgggtccgtataaaaaaccgcagccgccaagtaaacgaaggacagcacatttgaaaagatttcaatcttgcttagcgtgttaaatgccagcgctttttgcagcatatattgatattgctgaccgatcggcgcgattaaaaacatgacggccagcacgcggattaaatagacaagctcctcccgccgataaaaatcggcaatgagcggactgctgaagaacagcagcgcaaacagcgcaagccccgttatgatattcagccagtacaaggaagacatctgtttatcagtcacatgatctttttgaatgagcgcggcgccaaaacccatatcaagcgcaatttgggcaaacaccactaccgttgtgatcatgccgacaaggccgaattcagccagtgacatgacccgcccgagcagggcgaattggacgatttgaatgaccgtaatacacgctgtcgaaatacttgtccatttggcgccgctcaaaatttgatttgtaatactaggcatcgttttccctacttttttgtctgctgaccagaatttttatcgcgccccgtcaccggtccagatcactttgcacgttttgagcataatcttcagttccaatgaaaaggtcaggttgcggatataatataagtcaaacatcagtttttccctcggtgtcatgtcatatcccccgttgacctgcgcccagccgcttaatcccggcttaacggccagccgctccgtaaaccccggaatctcagcctgaaactgttccgtaaacacgggacgctcgggacgcgggccgatcaggctcatttctccccgaagcacatttaccagctgcggcagctcatcaatacgggtccttctgataaaagcgccgacctttgtcacgcggggatcctttttcagcgcccagaccgcccccgatttttcagcatctattttcatagagcggagcttatacaaataaaacggcttcccgtctttgcctacccgctcctgcttgtaaaaagccgggccgggcgactccaaacgaatcagtatggagaacaggcccatcaccgggagcgccgccaaaagccccgcaagcgcaaacacaatgtccatgaatcgcttaaaagccaaataacgggccgttctttccgtaacggcagcggaagtcccctgccgcactgcatagttattatttacattcatgcttttctctgctcccactgacacacacctcacgatttgttgggatgtttgatgacctatgccgtgagtttagcagatggatgttaattggaagtaaaggaaacgttaatgtttattagaatgtttcgattattgtttttttattgtaaatctattcatatccatatttgagacaaagcataatgaaaaaataaaaaaacagaccggtatgaaccggtctgtttccatgaaaaaaattatctgaaataggaggaaacgccttgggtgatccccgccgcgagtctgtcctttttcgttgattgttttagaatattggcatcaatcgggcttgtgacaaaaccggtttctaacaagacactcggcattttagaatacttaatgacgtaaaatccggcagttttcacactgcggtcacgcgtgccgagagcagaaaccattctcggctgaatattttgggcaagcctcagactgtttgccgattggtaggttttatcataatacgtctccgtaccgtttgcactgctgttatcattcgcatttgcatggacgctgatgaaaatatcggcgttcgccttcgcccctttgttcactctctcctcaagcgaatcaaaggtgtcgccctttcttgacattacagtaagcgcgcccgcgccgtataattgattgttaagacgcgtagcgatatcaaggtttacatttttctcaagcaagccgtttccggttgcacctgaatcctgatagccgtgtcccggatcaataaagaccgttttgccgacaacgggatttttaagctgcgacgcggcattgttgcttaaagatgaagcacttcctatgacggtgaagctggtgatgtttttacttccgatatacgtccggacgtcttttgacagactgtctccattcgtcagcaggtgaactcttccctgtttggcgctcagcacgcctccgacgatggtatccgcctctttaaagccattggtaacaaacgtatagcctgtgcttaagcctgtcttttttgcaagattcacagacaggttatagcggtttttgccgctgattctcgaagggttcggcagcttattataaagtgagctgctgatgctgcttgtcccgccgatgacaatcgtgtttttaatccctaagcttttgatcgcattggacgcagaaccatttaacgttgaatcattagtgaataaaatcggatattttttagcggacgcataagaaatcgcagccattccatccgcatcaacaaacccgttgaccacaagggctgtagaagatcttgtcatttcacccgccacttttgcggctgtggcatatctcgtgctccctgataaccgtttgacactgatgcctaatttagcaatttgatttgcggtatttttcgaaacggcaggtgtgccgcctacgataatcacatttttcgtttttaaatcaattaatcccttttttgtgccggcagacagctgatctttatttgtaaacagcagcggcgcatttttttgatatgcaagcggcgcagcggcaattgcatcggcatatgaagttccgccggtgataattaccgttttcgcttcaccccatgattgttttgccgccagtacagccgtatcataccgggtgcttccgccgatccttttaaccgtgttgtcagccaaagcggaagggacaaatagaatgaccccgagaataaagacggggagacattttatgatgaatttcaatccgatctcctccacagaagtttagtagtttgtaagtgctgtattaggataatagaacgcaagaatagaagtatacggctctccggcctccgctctttcttttgctccgtattgactcattcctacgccgtgaccgtatccctttcctgatatcgtgatttgcgaagaattaccggacgcactggcgtatgtgcttttaaaagatgaagctccgatcatcgtcctaagttcagacgctttcacctcaacagatgcagtcttgttcatgacatagcccttcgacttgtcattcacatggtacgtgaccttcaccgcggcgtcttccgcgcgctggccttttgtttttccggtgagcgagagatcagagatacttgcaatttttatggaacttgcattggtttctttatttttcatcagccaattttttattccgttgagctgcgcagcatttgcttcgtttgttttagaccaccaggatgcgggatttttcatatccagacccgctggcagctgctgcttctgcaatgttaaagaccagctgatttcgggatcttttgtgtcctttttggctactaaatacggcactttcgatccccacacttcatcgccggcttccatgtaaccgccattgcttgatgagtaagtggcatctatcaatctgccggaataagtgagcactttcccttttgttccgttaacggctgcggtggcgtttggataccagctgtatcccccgtaaacctgaaaggccgttgtatccgcgactgtttgtcccatcttgccgatagagtaggtgcgggcggcaacagcctgggctttcagcgcttctgtcggccagcttcccggcatttcattcggcaggacacctttcagataatcctcaaaaggaatgttttcattaacaggtcttacatatttgccggattcagcagtgaaactcatattccccagatatggcttcccgtcaatgctgattgtgtttgctgttgaatatttttcaggaaccgccttgaaagacgtttttccgctgttaatgcctgcaacgcctaatttgccgccggacgtttcaatacggtacgtctttccgtttacgagataaaactcttttgcgtaagcagccttaactgaatcggcaattgaattcgcgctgcctattaatgtataagaataggtgcctttcgttttaaaaaggccggcctcgtcggcgggtgtttcgctttttttgatgtatacaagcggcatgtgatttgcggcggcaatatttgatccgactacgatgtccgctaatttagtcccgttggcagccaccgttttgcttgcatccatgccaagcgaagtgactgcgtttgctgatatttgatatctgtttgatccggtaattcgtttggtgaccgaggccttctttttaatttgattctccacatctttgctgacgcttgaagtgcctcccatgatgatcacttttttaggcagattgtagctcggaagggagtcttttttcgtcagaagaatcggatagccgttttgcgcggcatatggcgcgattgccagcgcatccgtatatacatcccccgttactacgaccgcctggtcatagctgcccatttcggccgcaatatttttggacagatcatatctgttttttccgctgatccgtttcgtacggccgtatttcttcaatgtcttttccgcggctgacgaaatactgttcgtcccgccgatgattaaaatattatccggattgaatttcttgatttgcgcttctgtgctgctgctcagttttttcgcttcagtcagcagaacaggcgctttcagtttattcgctaaaggaatgacggaaagcgtgtccgcaaaataagcgtccgtattcacgacgactacgttggacgggtttttccaatacttagatgtcgcggcgttagccgtatcatatttggacgcgcctcccaatctgacaacggaggacacatcgcttcccgtcagtttataagttcctgaaggttcgatattcagagtcgatttattaccaatataattcgtcagttttactgagatatcagaactggccgcaaaagtgctttccggtaataaagccaggctgaatatcacagaaaaacagacagcccatattgttttcttcaatttttatcccgccttttgctgatcatggtgtattattttgctttctcgatttccttgatctctttttggcctttatcatttgtgaaataagtaatgctgactttgtcattttcgctgaatttattcagaacatcagagaagtcatcagaaaattcaaagctgacgggctgatcatccacttttacttcaattgtgtgcgtatccgccataccgatataatatgccgtttctttttgagcctggttctccgaagaaccgcttcccttctttgattgttccgccgttccgcacgctgccaatacaacagaaaaaagcagtattaagaacgaagctgcaatagtttttttcatttttttcacctcatctttatgtatcgtcttatactaactttttttaaggtaattttaaggtctttttgtaaccttttttttaagaatttcgtctattacatggttataagtaaaaatatgactgggtttataaagattagtaaattgcatcatgaaagttaatagaaaaggtgatgacaaatgagagctgaacgaaaaagaaagaagaaaaaggttcttctgacaatcgtaacaatcatcgggctgttagttttatcatcaggaggctacgtctactacttgtggcacaaagcggcttcaacggtggcaagcattcaggaagacttaaaaaaatcggacaaacgtgacacggatatagatctcggaaagaaggatccgatttctgttttaatcatgggagtcgatgagcggaaaaatgacaaagggcgcgcggacacgatgatttatatgaccgtcaatcctaaaacgaatacaacggaaatggtcagcatcccgcgcgatacgtatacgaaaatctccggcaaaggtacgatggataaaatcaaccactcctatgccttcggcggaacccaaatggccgcggataccgtcgaggacctgctcgacgtgccggtagattattttgtgaaagtaaacatggagagcttcaaagataccgtggatacactcggcgggattacggtgaacagcacgttcgccttcaactacgacgggcattctttcggaacggggaacatcagcctgaacggcgaagaagcacttgcctacacccgcatgagaaaagaagacccccgaggggatttcggcagacagcagcggcagcgccaagtgattgaagggattatttctaagggggcaaacatctcgtctgtcacgaaattcggagatatgtttaaggtcattgaaaacaatatgaaaacaaacatgtcattcgatgatatgtggacggttatgactgactataaaaatgcccgcagcaaagtcactcagcatgaactgaagggaacgggaacgagaatcaacaatatctattattacaaattagatgaagcaagcctcgcttcagtcaaaaaagaattaaaagaaagcctgaaataataaaaaactctgcatatgatgcagagtttttttattctgtaaaaggctgcggacgggtttttctatagccgtaccgataaagcagttcttccgcaatccgttttgaggccgatccgtcaccataagggtttgacgcctttgacatccgttcatactcggcctgatcggttaagagctgttttgtcagctgatacaccgtttcttcatctgtacccgccagcttcaatgtcccggctttcactccttcggggcgctcggttgtgtcccgaagcaccaagaccggctttccgagagaaggcgcttcctcctgaaccccgcctgagtcggtcaaaatgaaatttgctttcgcagcgaagttatggaaatccacgacctccagaggttctattaaatgcaccctgtccgaatcagcaaaatgggcttctgcggcctcacgaactgcgggattcaaatgaacgggataaacgacttgtacgtcctcaaactcttcaacgattcttctgacggccttaaacatctgttccatcggcctgcctaaattttcacgtctgtgcgctgtcaaaagaatcatcctgcttccttccagcttgtcaaaaatcggatgagaatagtcttcccgcactgtcgtttgaagcgcgtctatcgccgtatttcccgtgataaatatagaatccggctttttattttcagcaagcagattctgttctgcctggcttgtcggcgcaaaattcacatcagcgatcacgcccgtcatctgccggttgatttcttcagggaaaggagagtatttattttgcgtacgcagaccggcttccacatggccgacggcgatttgatgataaaaggcggcaaggcttccggcgaacgttgtcgtcgtatctccgtggaccaaaacgatatctggttttacttcttgaaacagcttgtccagtttcagcaaagcatgagatgtaatttctgaaagcgtttgacgctctttcataatattcaaatcaaaatcaggcgtgatgctgaatgcttcaagcacttgatccagcatctgtctgtgctgtgcggttacagtcaccagcgaatcaatttcctgatatttttcaagctctaatacgagcggagccattttaattgcttcaggtcttgtaccgaatacggtcattacttttagttttttcaacggtttgtctgcacctcgttttatatgtcggatatcccttcatgttaacatatttatgccgtttcttaatattgtaaagcttaatggcaaacaaagcaaaaaccgttacaagactctttgaaagcggattaaaaggtgtgaattttaatcaattgtggtaaagtggaaaaagactaggttatagttctgaaaaaaagattttgcagaaacaaggatggtgttattcagtgaagaaagtacgcaaagccattattccggcagcaggtttaggcactcgttttttgccggccacaaaagcaatgcctaaagaaatgcttccaatcgttgataagccgacaattcagtatattatcgaagaagctgtcgaatccggcatcgaagatattattatcgtaaccggaaaaggaaaaagagcaatagaagaccatttcgacaatgcccctgaactggaacgcaatttagaagaaaaagggaaaatcgaactgcttcaaaaagtgaaaaaatcgtcaaatattgcggatatccactatattcgccaaaaagagccaaaaggactcggtcatgccgtttggtgcgcacgcaacttcatcggcgatgaacctttcgccgttcttctcggcgatgatattgtccaggctgaaaaaccgggacttcgtcagctgatggatgaatacgaaaaaacattgtcttccatcatcggtgttcagcaagttcctgaaagcgacacacaccgctacggaattatcgatccgttaacaaatgaaggccgccgttaccaggtcaaaaattttgtagagaagcctgaaccgggcacagctccttccaacttggctattttaggaagatacgttttcactcctgaaattttcatgtaccttgaacagcaggaagtcggtgcagggggagaaattcaattaacggacgccatccaaaagctcaatgacattcagcgtgtcttcgcttatgatttcgaaggaaaacgttacgatgtcggtgaaaaactaggatttatcgagacgacgcttgaatttgccttacaggatcaggatatccgccataaattaattccgttcatgaaggatcttcttgaaaaagaagaagctgacgaatagaaaaagctgccgaatccggcagctttttttatgtgatctttactttttagacgttaccgtcagtgtcttatcagcattgttcacagaaaaagtatattcctggtttttaagcatgagcaaattctgattgattttgctgccgcctttttcacttaaagctgagatgtctgcaggacgcgataaatgaaaaaccacttcggagactgtatcattgtcaatcactacatccgtttttgcatcggatgcttttaatacgttccgtccgtcagccgtttgtcccgcagctggatttttcaatttacgctgcacatcgtcccggcttttattgagatatgagagaaactcttctgctgtttggcttgataaactgccgctgaaatcattcagctgaacatccgtcttttttaaagcgttcactttatatagatcagtctttttcataaagtactctttatcgtttaatttcactttagccgcctggttattctcggcttctatctgcaccttcgtaccgaaacttacacttgcggaggcttttccttttatatctttttcagtgtaaaggtccgccttttcagcttttaccaaagcaggtttattcacagactcataaaggccggcatcgctctgtttgacgtcaccgaaagatgtgatcgcacgcagaggcttgtctgaaaacatcgaagcgcctgcgccgacagccagcaatgcaagcagcgtaatctgtatcgtattggcaatgaatttaggcttcgctttcttttgctgggcctgagtgattttctgttcctcggctgcccgcgttctgccttcaatctgctcgttttgatatttctttttttctttctttgaaagcttgttgaaccaatccacaaaagctttatattcttttacaacggctttcgtttcgtcgaacatacgcatttcgccgtaatgcatccaagccacccggtcacacattttctcaatctgtccgatggaatgactgacgaaaaagatcgttttgccgcgttctttaaattccgtaatgcggtccacacatttctgatagaaagtctggtcccctactgagagcgcctcatcaataataaggatgtcagggtccatatgcgccgatatggcaaaaccgagacgggatttcataccgcttgaatagcttttaacaggctgatctataaagtcgccgatatccgcgaattcaacgattttttcataaagctcgtctatctgccgattgttgagacccatcatcaagcactttaaacggatgttgtccttgccgcttaattgattgtttaatccggcagaaatcgcgattaaagacggctgcccgttcatatcaatctcaccgcttgtcggcggaatgatctttgcaagcagattggacatcgttgattttcccgagccgttgatacctacgaatccgatcgtttccccttcatagacgtcaaaagaaacatttcggacagcgaaaaaacctttttgatttctgtttgggaaaaacaatcctttaattttgtcagactgttttttatatagaaaatactgttttgaaacatttctgaacgaaacttttagtttcatcgtataatctccttactatattaaagaaagtcaacaaacttatctctgaatttcatatgaagaagtgaaccgactgttaacagcagcagtgtgacgaaccagaaatacagcgtgtatttcacatcgtggaaaaaccactgcccttccataaagctgtctctgaagccctcgataatatagaaaagagggtttaacttcaagatggtcaaaacttcaggtctgtttccaaatttctccgcaatgtcccagaaaatcggcagaagaaaaaagagaagccttgtgacggcttgaagcaaaaactgatagtccctgattaatacgctgatggttgaattaaacaggccgaaagcaaacataaaactgatcatgcaaaacaagtaataaatatattgcagccagtgaagcgtcggaaacagtccgttgctcagcagcacaataatataaatcgccatcatcacaaagtaactgaataaattcgatgctatcactacagaaggcagtgaactgatcggaaagttcattttcgacactaaatttatccgtttaaaaacgctgttagatgcatccagtatcgtcggactgataaagaaccaaggaattaagccggccagcatccagacgatgaacggtacgctgtctccatttccaagcaccatatcatgtccgccgcgaatcccgaggccaaatacgaaccagtaagccagcatttgaatcatagggttgagaaactgccacaatatacccaaatagttcacttgatactttgatttcgtttcgtacactgcaagccgcataatcagcggaaatgagttgaattgctctttcagaatttttaccaatgcattcattctaatcttccttagtcgtaagttttaggtaatagctttgacttacaaaagcaccgctcataattgtaacagattacgatgtatttttcacttcataacaagcctgagtcccatgagcgcaacatgccgtcacttaagcaaaaaagcataattaacatggttaaattatgcttttttgcacttatttacttgtccccgaaaatcacttttacggctttttcagacgattctccggtttctaaataacagaacttctcgtaaaaaggcccgaacgaatccggaagcttataatcatctgattccgtttcattgacccatttgataacgtcacctgtttctttgacaagcgggccgggcgcttctttttcaaagtcaaagtaaaaccctctgagtttatcccggtacgtttcgatatcaggcacataaaacagcatcggtcttttcagattcgcatagtcaaaaaagacagaggaatagtccgttatgagtaaatcagagaccatatacagctcacggatatcttcgtagctggagaaatcatacgcaaatccttcatacggtccgagatcaaagttttccgccacgagataatgcatccgtaaaataatgacataacggtcgccgatcgcttctctcaattggtgaaggtctaaatcaaggtcaaacttgtattttcccttcttataaaattggtcatcccgccatgtcggtgcgtagataatcacttttttatcttgcggaagattcattttttctttcagcgctttaatgacagaagggctgttatccgtctgaaggaagtcattccgcggatatcccgattcaatcatggttttattaaactgaaacgcccgggcgaatatttcggttgaatatgcgttcggtgaaatcaggtaatcccactttgaagcctctgtcgtaaagttgcgcttgtatttttcagtgtttgttccgggcatatgcacttcatccatatctacggcaaggcgctttaaaggcgtgccgtgccatgtctggacatatgtcgtatgctcaggtttcggaatccacagcggcatacggctgttgacaacccagtactcggctcttgccatggcaaacagccatttgaacgtgaagcgttcgatataaggaatccctttatctttaaatgtctgtgagtaagcggggtttacactccagcagagacggtattccggcatctctttgctcatgtattcataaatcgcccgcgggttgcagctgtactgttttccggcaaagctttcaaacatgacaagtttctgtttgacaggcagttttcctgcaaatctgaatcctgctttgtaagtgttctgtattcttttctcaatgaactttttcagcttattctttctcttgcgtacaaaggaagcgccccgtttcagcttacctttcacaaaatactccacgcgggtgctgaagctgtaatcgttcattctcaggtggagatttttcgttttctttttcgtgaaaacgtgaaatctggcaggccctttttccgttttcagaaccgtgaattggttagggtttacatgttcagatttcagaacctttaacggtttgctgttggtgataacctcttcacctgtcccggcatcttcaaaaatgaattgaatatggaattgaaagatgagctgctgattcaattctttataaacagcattcaaatcaatttttgtatcaaagcctatcgtgtcaagcatcgttgtgtcctgaacatattcatcaaggtcgtgtctcggcacgtcgtgaagcggatacttcagaatgagaggctcctcttcttttccttttttcattttcagaatcaggtttttttcttttatctttaaggtttctgccgcattcagccggaatgcaaaacctttcagatgtaagctgccgtcagattcgagctccatttcatcaatccgcgtgacgaactttttctgcagcagctttaaggagaaattccctttcttcgtcgtgtaagggaaaaagtacatatgatgagcctcatctttataagaagacagttcaataggttcaaggctggattttaaccgttttttactgatatcactgtcatcattgataaaggagacatagaaatccagacatcctttgccgtccgtatggtcagaaagcagatccgtgctcatgacagcatggtactctccgccctctccggccaaccgtttcagagggacggaaagttccgcttttgttttacgatttataatctgaagagaaggctcttcccctgcagtgacattttcacaggatatcgtaatgctgaatgtctcttcctttatgttaagatgttttaacttgtatctgacaggattttctatacccataaaataagtctactcctctgtttcaattaaacatatccaatcacaatcatcattttgttactttcagtgaaaggttctccttcaccgtccggtagaattgatattgcagtccgttcgcttctgccgtcaccttttcaccgtcttctctgtttaacatgacacgttcataatcgttataaatgacatacataatataaccgccaagtccgactttttcaatgtcacttaacgggatttcaaggacgtaccgcccgtctcccagtgactgaaccggaaactggtggtgtactttcatgttatctctgtgctgaaactgaatatattgggcattatttctgtcctgtccgaacaagcggaacgtaacggtgaatttatgatcggcgaacaccgcgctttccgtttctccgtgcatgcgaagttcgaccagtttattttcttcatccgtcagcgggctttctaaataagccagtccgtctttcgtcacgatgtttttatcgggctcttttttggaccagcggaacagcttttcgacctcatcataccgtttttgagtcagcagacggtaggctgttttatgaatcggatgaaaaaatgtctcggaaatatcgtatttcgtcttctttaacacattcagaatttcattgaatttattgtagtaggcttctttgttttcgcttttcaggaagtgcatccgatcgaaaagccgcgtaatggaatcgaattcaatcaggcggttcatcgccatcttctctttttcagtatctaattttttgttcagaatatacttcattacggctatgttcgtgtcggttttttccattatattggtctgctttgtcagcgactcattattgtccattctgttcagataatagaccggttcggttgacgttgaaatatctccgcacgccaaaagaacatccataaaaaattgcttatcttcagcaaatttcatttccggatatctgatatcgttatcttttagaaattgtaagttcatcattcttgcccgcgggcccagatgatagaaaatatgccggattgaaaaaggcgataccttcgctctgttcagcgaagactcatgtttcccgatcgttttttgaccgttcacctgcatttcgatcgtttttccgaccgcataatttacatgatctctttcaagcatgtcgaataagattttaaccccgttcggcgcaaaccaatcatccgcatccaaaaatgtaatgtacttcgcatttgccagctcaattcccaagtttctcggataagccggagttcccgtgttgtctttcaaaaagacaactgtaatattttcatacaattcggcgtactcagtcaggatgtttctggaatcatcggtagagcaatcatctaccagaattaaagaaatatgctgaaagccgatgttttgaaggatcacagaatcaactgttttccttacatattcttctgcattataaacaggaacgactaccgctaccttcttctcttccgccaatgcttctttgtttaaaatggtatattcgcgttcttctatggacggcttggactcttttttattcaacttaaaaaagttactaagattcatctttaaattctcctcttattgtctagctttttttcaaaagcgcataacaaatatagcgaaaataaccttatattacaagaagtactccctatccggagggagtacttctttatcatctgtatatccgaatgtttcaattacaccccggcaatttcttttttaatctgtgtggtggaaatgccttcggttctagggagatagatgacttcgcattgatctttaaggaaatcgaatttgccttcccaatcgtctcccattacgaacacgtcgatgttgtgatccgctacgtcacgtactttttgatcccagctgttttccggaatgacttcgtcgacataacggatcgtttccagaatcagctttctgtgttcatagctgtggtaggcctttttttgtttttgcaggttgaactcgtctgttgagatggcaacaactaggtaatctccaagctgctttgcgcgctcaagcagtttaatatgaccccaatgcagtaaatcaaacgttccgtaagtaatgaccttcttcatgaaacaaaagctcctttctatcatcatacgtataacaagcaactgccctgaaatgctgcgcagctgtatccttaatcactaaagtgccaatttcgtactcatggaacctcattatatcacatagccctgaaaaggttaagctaatgtaaaacgaagttaaattccacttattaacaaatgttattgcaataggagtttagcagggtttttgcgcggttgattaaagaaattgttatcttatttatatttttgtaaaactattgttaagtttatctgaaggtattatgttaaaataaagcttagcttaagtcacgaaaaaatgaaagaaaatcccgtacaaaaaggaggacggcagatgcagactgaaatggtgcacaacctttcttatgttaatggaaatttacaggagtttatttcatatttagacacttattatatcgcacaaaagcaaggagccgtcattgcgacggtcaaccctgagatcggatacgctgcggcgaaagacaaaggttatcatcaagtcatttcttccgcggatttcgtcctgccggatggtatcggcgtcgtgttaatgtcacgtttgacgcagcacccgctgaaatcaagaattgcgggattcgatgtatttctgtcgctgctcggtctcgcaaaccggcagtctaaaaaaatatttttatacggagctaagcaagacgtgcttgacgccgttttgaaccggatcggcaaagagtatccgaatattgaggttgtcggagccagcaacggttatgaagcggataaacgcttcgtcgccaaacagatttcccgggcgaaacccgatctcgtgtttgtcgccttaggatatccccatcaggaacaatttatttatgaatacaaacatcttttccctcaggctgtatcgatcggtttgggcggaagctttgatgtgttcagcggaacggtgaaacgcgcccctgaatggatgatcaaaacgaatctggaatggctgtacagactggtgacgaatccgtggagatggaaaaggatgctgaacattccgaagtatgcttttaccgttttgagaaataataaatcaaataaaagcctgtattccgagcaggcagaagatcaaacgaaacagctttaaacaaataaaacagcaaaagagattggtaatctatgaacttgcgatctttattcgccgctttttattctatatatctgtctgttctgggcgttttgttcaagcctgtaaagcccaagaaccatctgaccctgctggtatcttttgaagagaatgcacaggctctcatccgttcttacaaagcgcacgctgaatcgctttcttatgaagtgacggttttgtatacgagacacgccgtcagtctgaaaaaagagctggaaggactcggctctttttatctgaacgaaaaacatccgctgcatcttttgaaggcggttttgatcctttttaagagcaaagcggtgataacggataactatttcctcatgacaagcgtcttaaaccgccggccgcaaacgacatgtattcaagtgtggcatgcgaacggctctttgaaaaagttcggccttgaggatgtgacgaatcaaaaccgtccggcatcagacatcagccgttttaaaaaagtgtaccgctcgtttgactttgtcaccgtcggttcagacgcgatggctgacgtttttaaaaagtcgttcggcatacgggacggccagctgttaaaaacgggtgtccccctgactgacgtctattatgaagaacacaagcccgaaccgaagcacaaatggccgaaaaaaatcatcctgtacgcaccgacattcagggattatgatatgcagtcctttcggctgccattcaccgaagaacagctcacaaacgcgttaaacggagagtatatgctgcttgtaaagcttcatcctgccgttttgcatcatatttcggcttcgtttgaaagcgaattgatcaagaacgtgtctgacatgcgtcttcatgatctcttgaaagcggctgatattttaattacggattactcttccgtgccttttgaattcgcgctcttaaataaaccgattttctttttcacgtatgatctggaggaatatgatcgaaaacgcggtttaatcgacaattatacttccgtcattcccggaaaggcttgtcatgacagtgaagctcttttggaggaaatgacgaaaaagccatttgatgcagaagaaatgaagcggttctcggacaaatggaatatgtattcagatgggaattcgagtgaagcgttattgaaatttgcggaaacaaaaatgaaaaattgtgctgaagcacctgcctgaatctgaggcgggtgttttttgcatgaagaaagggctgaagcatacacttcagccctttttttatactttcatatacacgggaacatcatagtaaagcgtatagtcatccagcagtgagtataagctgtacatgcggtttacctgcttatacgcccagccgatgtctgtcgcatactgatgagccgcggctggagaccatctcattttatacagcgtatcctgctcgtatgaaggattgtgaatataagacgcaccgataaattgggctccgccgataatcgcggcttccggagtaaaccagccttgcttatacgcgtattgtgcgccgtagtaattcgggttgctgtcataagccccgatgccgtacatgttgtaaacctttttaccattatacataatgccgttcgcaagctctgacgtgccattgcccgtttcaagcaaagcatgcgaaatcaaatacacttcattaatgctgtatttgccggcggctgtaataaaggcctggcctttccctgtcagtattcctttattgaccagcactttttgattcagttccgatgcgttcagtccggctgtctgagagagcttcagaaattgaaagtaatacttgctgtcttgtgcgaagtgagccggattgacgtactgcccgacttcgtcactgctggcgtttctccagcccatgctgagtttggcccagccgtttgtctggcctgtgatgctgactttatcgccttttttcaactgcccgataatattgcctgagctgacttccggggttgaccggacgttcaggacgtcggctgtgaccgttccggaggccgtattgatgtacgtaagcgatgcataagccgcggcatcagtctgcgggctgactgtcatttgttttttgaccatatctgccagcgagatgttgtaattggtgttcatgatttgcggtccgttttttattttcagaatagccatcgtccatccgtacagctttttcagcttttgggaggcggcgtccgctgactgcgctcccgtgaattgattgcgaatgcggagttcataaaccggatggctttcactcgtatagccggcctgtaattgtttggcgctgaaaaagctcatgcttttatttaaaacggttttactgctgaatttttcggttttgatgacgtattgtgcagagccggttttccccgtctccttcacagtgccggccgctttgttttgcttgaaaaaagcagtcacgcggtcaatgtcttccttcttaagcagcggtgccgtttcaattctgaattgtgtatacgccgcttcacctgttttctgtgcggaggcggatacttttttccctttgaaaaaatccagcgattgattgatctttgccgtatcaagcagtgattcggttgtgacttggtacgttgtgtccgtctgcttggatatcgtttttgaaatggcagtcagtttatatcccgccagcagattcaatcctttttttatcttcgactggtctgccgtctgctgagaaagcagctgatattcgttttctgctgtttttcccgccgctgttcttgccgtctttacatgctgctggcggaaaaacgcctccgtttgatccgcctttgcagcggtaagctgccctgccgtgatccggtaaacggacactgatgctgtctttttgacaggcgatgcgtcgcaatgccattttttctttttaaagaaagcttgcacgctttgcagctgtttagccgtcagtccgctcatcgcgaccgtgtaattattcttcttgccggctttttgatagcttccgctgacacccgtattcttcttgatttgggtgatagcattttgtacggcgcttactccgttaaaatatcctgactgcacgttatacacggttgctgttttgctttgggcatacttttgaacgttccctttgacgcctgttttctgctgcagctgtttcgctaaacctgccgcattatttgcatttaaaatgtcagaggctgtcacggtgatattcggactggcctttgccgtgactttcagcgacgactgcaatcctgtttccttttgaaaatcagtttgaatttgagcggctttttgatcgccggagattgttcccgattggatctgaaaccgggctgtttcccgtttgatctgacggtatgacgctttcacgcccgtctgcttcgtcaacgcttgcgagagcgcttttgcatccgcatcggccgccatctcagaagtcacgacctgcttatacggctgttttgtccccgccggcttgacggcgccggtcacgcccgtttttttcgtcagttcggcaagaagatttttcgtctgccgctcgtctgatagaacgcctgatgtgacggtcacgtacggctgtttgcttccgcttgcgctgtaagtgccggccacgcccgtctgcttcgtaaaatctttcagcacggttttcgcatccgtttcatcgtgtaagcctgaagctgagatttgataagtgagcggcgcatttccggctttctttgcgtcagcctgccaccccgtatcctttttcaatttcgctgccgcttgaagcgcctcgttctcagaagcaaattgctgcttcgtttccagctcgtaaacggagtagtcgctgtatgcggcctcggcgtgctgtgtaacggtgctaaagacaaggaaaacggcggacaataacataggtgcaacgaatctctttttcattccttctcctctttctgattcaattggtttctatcaaactagtttatttatcggcccgctttcttcatttttacagagagaaatcatccaattatccaaataaaaaaaacttaatcccagagctgggattaagtttggttttatatatgagaaacgatgatcgtgcaatctccgtttatcgtaaagtcaggcatctgatccggcagtatgaaatgcgcgcctttttcaagcttggcggacttgccttcaaagatgatggagccgcttccttctgtgacgctgcataacataaacggagcgtcctgggtcatttccgccgtcccgctgatatcccatttgtatacagaaaaatattctccctgcacaaaggttttaatggtgatgccttttctcgtttcagttgattcatccaaaaatccgtccacatgaggaacggtggcggcgttgacggcatcgcggatatgcagctcacgcgcaccgccgttttgatctgtacgcccgtaatcatatatccggtaggcggcgtctgaattctgctgtatttccagcacgagcgctccggcgcaaatggcatggatggttccgctcggcacataataaaaatcgccgggtttgatcttcacgcggcgcagcaggccttcccagtcaccgctgttaatcatggtgacaagttccgctttcgaacgggccgtatgaccatatatgatttccgcattttctttacagtcaataatgtaccagcactcagatttccccgtttcgccctgtccatgctcctcggcgtcataatcgtcaggatggactttaacggacagatgatgtttggcgtccagtattttagtcagcagcggaaaccggtccccttccgttccgccgaataactctctatgctgatcccacaggtccatcaaggttttcccttgatacggaccgcttttgaccgtgctcattccgtgcggatgggctgatatcgcccagcattcgccggttgtttctgaaggtatgtcatatccgaatcgttcgcgtaataacgtgccgccccatattttttctttacatacaggctgtagaaaaatcggctcttgcgtcatgttcgttcccctccccttaaaaagcggctcatatcccattccccctgtgtcttttttaaaacacggagggagccgcggttaaaaacaatatgtataaaatggctgacctgctcattataccattcggatggggcggaatgctcagtcatttcctattccagaataaaatgccttgtttgtcgcaaattaaaataactgatggaaaggggggaacattatgacgatacatgcggagctcggcaaaaaccttgaagcgctgaaaaaacggatcggccaaagcgatgacatgatgttttattcgtttacgtacggaaacggcaaatgtgacgcctgccttatatatatagacggactgaccgacaatcaattgcttgcggaatatattatttcgcccgtgcaggcggccgccctgcatcaagaggaaccggctgaaataccgccgtcatccatctctttcggctatcgtcacacccggctttcttcacttaaggacgcggaggcagacattttttccggcaaatcggttttgctggcggagggatgggaggaagccctttcgtttgaaacggaaacatttaaaatgcgtgatattgaagaaccggcttcagaagtgcttgaacggggacctaggataggttttgtcgaaaagctccgaacgaatacggcgcttttgcgcgagcagtccggtgatcccaacctccagatcaaagagatcacactcggcgaacggacaaaaaagcggatcgccgttgcctacattcgggatattgcgcctgatgatgttgtaaaagaagtgatgaaaagactggattcgatcaccattgatgacattccggaatcaggaacgatcgagcagcttattgaagataacacgtattccattttcccgaccgtcttgacgaccgaacggcccgaccgggttatgggcgctcttttggaaggaagggtctccattcttgtagacggaacgccttttacccttttggtgccggctaccattgatgaatttatccactcacctgacgattataatcagcggtgggttccggttaactttctcaggctgcttcggtatacatgcattttaatcacgatttatttacccggcctttacatatcgctcgttacgtttcacacggggcttttgccgacgagaatggcggtgacgattgccggaagcagattgaatgttccgtttcccccttttgttgaagcgtttattatgatttttacgattgagatgatcagagaagccggactcaggctgccgaagccgatcggacagacgatcggcctgatcgggggcgtggtgatcgggcaggccgccgttcaggcgaacatcgtcagcgcgatgatggtcattatcgtatccgttacggcattggcttcttttacggcgccctcctatgcgttcaattttccgctgagactcatccgtattttttcgatgattttgtcggcgatattaggtttatacggactgatcatgtgttatctgcttgtcgtcggccatctgatgcgcctgaaaagcttcggccaggactatcttattccgatcatggcgcagccgggacaggacttaaaagatacgatcgtcagactgccgacgcctcttttgaaaaaacggccgaccagaaaagagacgaaagataaaatcaagcaaaggtgatcaccatgaaaaaaccggaagacaagctgtcgtttatgcagacacttctcatggtaagcggaacaatgatcggagcgggcgtgttaacactgccgcgctccgccgcagcagcggacagtccgagcggatggatcattattcttgtgcagagtctcgtgtttatcggcatcgtcctgctctttatgccatttttgcagaaaaacagcggggaaaccatttatgagctgaatcaaagcattatgggacgcgccatcggttctcttcttaatttattcatcagctgttattttgtcgtcaccgtctgttttcaagcccgttttctcggtgaggtcatcaattactttttactgaaaaatacgccgatgggtgtcgtcatattcatctttctggcggtcggcatctaccatgtgaccggcggggtgtatcccatttcaaaactctatgcttatctctttccgattgcgatcgtcattctgattacgctgctcatattcagcctgagactgtttaaactggatttcatccgcccggtcatggaaggaggctacaaaagcttttttgagctgtttccgcgtacccttctgtatttttcaggacttgaggtgattctttatctggtgccgtttatgaaaaatccgaagcaggcgaaaaaggctgccgtcttcggcatcgcatgcgcaggcttattttacagctttacgctgcttgtcgtaatcggctgtatgtcgatcgctgaagccaaaacggtgacatatccgaccatttccctgattcacgccttggaaatccgcggtattttcatcgaaaggtttgatatctttcttttaattacgtggacatgccagcagttcacctgtatgctcggttcttttaaaggagcgcatctcgggttaaacaccattttcagactgaaaaataaaaacaatgcctggctgctggggggcttattggcagtgacattcggcctttcaatgtaccctgatgatatcaacagtgtgtttgcattcgcgaatattctcggatatgcgttttttgccgtcattatgattccttttctcatctggtttgtcagctggatgaaaaaaatagccgggaggaaacagacgtcatgacacatttcgtaaaatgggcggcggcgcttttcatactgatgacgctttcagggtgctgggatgcgaaggaagtcgaaaagctatctttcgcccgggggctggcgatagacgagacgagtgaccgccgatataaattaacctatcaaaacctgctgccccaaagtgaaaacagccaggcttccggccggcccgtgtttgtcaatgtgacgtcgcggggggataccattcttgaagccgtcagtgaagtcgctttaaaagatccgcccgtttacagcgatcatttaaaagtgctgatattcagcgacaaattgctggccgaccaaaatatactgcagatgatgaaccattttatccgtgatgatgaattaaggcggagcagctatctcttcgcggcaagaggcaaagcggccgatattctgacagagccgacgccgaatcagcagcagcccatgcccgcggaaaagctgatcgaccttacgaacaacggcggctacaacgggaagattttaaaaccgctccgaatcgggagagcttcgatttactgccataataaactcagttttctcattcaggccgtcagcaatcaaaaaggaaaaacggtgtatgacggagcggccattatcaaaaacggaaaacaaaacagattggcaggctttctgtcatcatacgaagtacaaagcctgaattggctgacggggacgatacagggcggcgtgctgcccgctttggataaaggagggcacccaattaccttcgagatcaaaaaatcaacatcctccatcacccccctgctgaaaaacgggaagctgtcgtttcacgtagcggtgaaaacaaaaggacttttgtcagaggatcaatatgccggagaagattcattcgatcagcactatttaaacgggctggaaaaggttttcgaaaaaaaactgaaaagcgatatgaaagaagtcatcgataagctgcagaatcaatatgaaacggaccctgtcttcttttctgacagagtccgcattcaatatcccgactattggaagaaagtgaagcatcactgggatgaaaccttctccgaagcggcctttgactatgatgtttccattcagattaccaacttcggaacgatggggcggtagccttcagcgtgttttttcgacacgaaggagaatctgataaatccggctttgttcgggcagctgtgtcaccggaaattgcatcgattgcgccattcgtgtgatttcctgtaaaaacagctgcacccgctcatccacgtgaacatacgtataggactgctttttcacgtcaaatgtctcttccggaaagagcgtgcgcaccgtctgcggcgtaaaaaaccgcaagtgggtgcggtcgagaatcccggcgtctctgtatgtccagtccccgagcagaagcgggaacagcgcttcggcgtgggaaatattcggaatgctgcaaacgattgatccggcaggcgacaaataggatgagtacgtttcaatgacgcgccacgggtcttttaagtgctcaaggatgtccgcgaaaatgatgcaatcaaaaaagccttccggataaggcagcttcactttttcgacatcttcctgcagcaccgcttcataatgtccttttgccgcttgcgccgccagcgggtgcagttctattccgtacagttcgcaaggctgtctgttttgaagttccagccccgtagctcccgcaccgcagccgacatcaagtatccgtttcgcctcccggggaacgagctccgcaatttccggtctcggatgagtaaagtacgtaaaatcagtgccccatttttccgtaaaacgctggcggttctccgaatataactgattgatattgatatcctgattagccgtaaacgtcgcatgcccgtggtgatgcacaaaggcatcgagagcgatgtgcaggctgtatcctttttgcagggcgcgcagacataggtcatcatcttcaaaagaaccgtatccgaattgctcatcaaacgggccgatgtcttcaatgacgctttttttcaccagaagacagaagccgacaaggcgcagcacccgctttgtttgatgcttttcccgtgcacaatacgcctccgcgaatgactccagctcatcaagcgattgatacgcgtcatggatcatttgcgcgccgctgacatagttgctgacgggcccgaccataccggttttttcagattgatacagcaccctcagcatggaggtgagccaatttttcgtgaccatcgtatcgttgttcagaaacagcagattttctccccctgccgcttcgattccctggttgcaccccttggcgaacccgaggtttttttcattaaggatgactttgacgtcaggcagatttgatatgtattctctcgttccgtctgaggaaccgttgtcaactataatcagttcaatcttatctttgtcggtgtatcgttcaatgctggccagacattttttcgtcagctcaagttcattatatgtaaggataataatactcgttttcaccggcatccccgcctttatcgtgactttatacaacgtatgacatatccccgtcatttatgtgaccgtgcgggcgcccgcacgcatccgttttgaggggccggtgaataaccgcccccctaaaactgaatattacggatgaactgtccgccgatttgattctgatcccgagcctccgttacggcttttcagatcctgctcaatttcttcaaggcttttccccttcgtctcggtcactttaaaccggacgaacaggaatgccattattccgatagcggcataaatgagaaataaatagctgatgccgactgcttccattagcatcggataggttaatgagacaatcaatgttccggcatgcagcatcaaagtggagacacccgtcccgataccccggacatgcagcgggaataattcaggaagcatgacccacacggcaggcccccagctgaccgcaaacacaatgataaacaggcctaaacaaatcaccgttgtccatgatgcggctgctgaatgttcaaagaaaagattgaccgcggccaatacgagcagactgatgaccattcccgcatttccggccagcagcagcggcttccggccgatcttatcaatgactttaatagccgcaagcgtcatgatgacattgacggcgccgattccgaccgttcccaatatagacgcggaattgccgaacccgacactggtaaatgttttcggtgcgtaataaataattgtatttgtcccgatgaattgctgcaaaaaggcaagtccgaggccggcaatcagcgcgggtctcacccacggctcaaacaattctttcaagccgccttcgttttccttttccgcttctttcatctgatcaatctcatcatcaatattcttcgttccccgcaatgatgaaaggatttctcttgctttctcttctttgccgatcgtaaacagccagcgcgggctttccggcataaataagattccgatcagcagaatgactgacggcacaaccgcaagtccaagcatccagcgccaagcgcctgcatcggcaaatatatagttcacgatataagaaacgaggattccgaccgtaatcatcagctgattcagcgaagaaagcgccccccgtttatgcttcggagccagctccgataaatagagcgggacgatcgttgtcgatgttccgacagccagtccgagaataatccggaaaagaaccatcacctctgtattcggggcaaaagcgactcctaatccgcctatacaaaacagcagcgccgctcccatgatggccttccgcctgccgaaccggtcggtcagtttgccggcgaatcccgatccgagaatcgcccccgccaataacgaactgacgacgaggccttctgtaaaggcgttcagtcccagttcttttttcataaataaaatagctccggaaatgactccggtatcatatccgtataacgcgcccccgagagcgccgaaaaaatagagccatttattcgagtgtatgcttttcatgttatatagactcccttcatccaacgctgtatccgcgcggaattgttctactgcttcttttgcctgtttccgatcgtttcaaaccttccgcaccgttaatatccattattttactgattatttttcacaaagcgacgaaacatttcccgcttcctgccgtccaatataatgtgaacctgatgcaaaaataacagtagatgttgtcgaaatagagagaaagatttagaattttctcatttgcagagttgctccgagtcaacaattatggtacgcttcacaaagaatagaaacgagaggtaatgatatggaagaacgatctcaacgcagaaaaaagaaaagacgcctcagaaaatgggtgaaatttgtactggtattcgccgctttcttattggtgatcgccggttccgtcggcacctacgcatttgtgaaattgaataatgcgaccaaagaagcgcacgtcagccttgaccgcggcgaccagtccgtaaaacggatcaaagaatttgacccgaagaaggattctttcaccgtattgcttttaggaatagacgcccgtgacaataagggtgaatcagtagatgacgcaagaagtgacgccaacgtgctcgtcaccttcaaccggaaaaagaaaacagcgacgatgctcagcattccgcgggattcctatgtcaacatcccgggacacggctatgacaaattcgcgcacgcacatgcttacggcggttataatttaacttataaaacagtagaaaacatgtttgatattccggtagattatgtggttgaaagcaacttcgacgcgttccgcgatgtcgtcaatgagttgaacggcgttacggtaaatgtgaaaagccagaaaattgccgatcgtattaaagtcgatacaaaaggaaaagtcgtgctgaagccgggcgtccagacgcttgacggtgagcaggcactggcttatgtaagaacacgcaaagcggacaccgatctgatgcgcggacaaagacagatggaagtgctgagcgccattattaaaaaatctaaatcgttaagctcgatcccatcttatgacgatatcgtcgacagcttagggaaaaacttaaaaatgaacttatctcttaatgacgccatcggtctgttcccgtttatcacatcgctgaaatcggtgaattctttgcagctgacaggttcagacagctacatttacactcctcagtacggcaaaaatatttattacttcaagctgaatgaggaaaaccttcaagaagtaaaaacgaaattaaaaaatgatttagacgcgtaagatgtcacggcgggattagcaaatcccgccgtttttctgttgaaaaaaaggacatgaaggtatagccttttaactgacggctttctgctgatttcgcacaaagctgaacatactacatgaagcagctttatttttaaggagggcatccatacatatgaaattgatagccattgacttagacggcacattactgaattcggacagtgtgatttctccggaaaacagagcggctttacaaagagcggatgaagcgggcattctcgtggccatctgcacgggcagagccacgtttgatgtaaaagcgctcttgaaggatttggatattccgatcattgcggcaaacggcgggacagtccatgacaaaggataccgcctcgtcagccggctcttaatggatcagcaggccgggaaggatatcgccgcttatttaacggacaaagacatttactttgaggtctatacagatgatcatctgctgtccccgtttgacggcgagtccaaactgcaggcagaactggacattctgaaaagcgccaatcctaaggaagatattcagacattatgggagggcgcaaagacgcagttcaaacaattcggcattaaacccgtacaggatatacaggcgatttttaacggagacgaacatgtttacaagcttctttgtttctcttttgatatggaaaaactgagaaacgccaaagaagaaattacacatcatcggaaattatcccagacatcttccggaaaacacattatcgaaatcctccctgccggttccggaaagggacgtgctctgacggagcttgcctcactgtacggaattgaaaaacaggatatttacgccatcggcgacagcccgaatgatttctccatgtttgaagcggcgggaaaccgcatcgctatgggcaatgcgattgatgaactgaaagaaaaaagcacctatattacaaaaagcaacgatgaaaacggcgtcgcatatttcatcaaccggcttctcgacaatgggcaataaaaggtaaaagtcaggtctttcacggcctggctttttcatgttttctaaaaaaggagtttcatgatgtcgaatgcaatcgctattataggatttttagcttttctctgcgcagtcggatacggaatttttcatctcatatgcaaagcggcaaaaaaagaaaaacatttttcaaaaaagctgttttggcctcttctcatcggcggatttatcctgcttctgaccggtgcatccctcgcagagccggacgcctcggccgtgaaggcagaggagaaatacagcacccttgatacggcttatcaaaaattgacgaaggaacaccaggcgcttgagaaaaaatatgaaagcatcagtgccgcagccgaaaaggagaaatccgaagctgaagccggcaatgaagaaaaactcagcaaactcagccaagagataagcgagctgaaaaaaacaaacaaatcactcaaacaagacaatgagaaattaaaaaattcacaaaagaagctcgaaaagaccgctgaaacgcttcagtcagaaaataaaactttaaagcggcagaaagcagaaacaaaaacatccgaaaacgcggaaacggcgcaaaacaacgccccttcctccggaggacatgccgaaacgaaagcagccggcacctcacagggatgcgacattaaaggcagccggtacggcatttatcacacgccgggaagtacgtactacgaccggacgacagatcccgcggaaatgttctgttctgtagaggatgcgatagcggccggatacagagcgccgaaacggtaaaagaaaaagacgtcagagacactctctgacgtctttttttacggaagccggatgccgcccgcatatttgtccttccaataagcgcttgtgttcatatttgttatggtaacacctgcggacacggtgacatgaatcacttgtccgttcccgatataaatggccggattcaggctttccgctttaaagaagaccagatcgccgggcttcagatcttgtttatcgaccggaacgcccgcctgcatctgcttgtcggcataacgcggcaggctgattcctttcgctttttgatagatgtattgaacaaatcccgccgtatcaaagccggtttccggtgaagcgccgcctttcagataagaaattccgatatgatcggccgctgtggacacaacgggattgtctttagaaatggctaaattgctgaatcggcgcacccctgtgaaatgttttttccaataatcttccgccaagtaagaaatggtgactttttcggagcggcttgcttggatgaaccttccctctcccgcataaatgcccgcatgggaaattccttttttatacgtatcgctgaaataaatcacgtccccgggctttatgtcgctcagtttgattttctcaccgaccagccactgctgttccgcagatctcggcaggtaaatgtgaagcttgttttcaaaaacatattggaccagccccgaacagtcgaatcccgcctcaggcgtgcttccgccgaatacatacggaatgtcgaggtaacgggctgcctcctgaacgatcggatcatcagccagttccggatcttttgtcatccgctttgcgccaagatataaattcatccaataactgcttttttgaaagcgtgtgacggttacgccttctgacggagaactgtgtatcatctctccgtttccgatatacagaccgtcatggacggccgcgttttgtgttgaatctgactttttgaaaaacacaagatctcccggtaaaaggtcattttctttgacggcggctccgactttccattgatcactgaccgttctcggcagatggatgttctgcctgctgaaaagataatgcatcaatccggacgggtcaaaaccgtcctcaggctcttcgcctccgtaaacatatttatttccgacaagtttttgcgcgtctgaaacgatcaggacagaaacttgagaatccgcttcggcaatttccgttctcgttactgcaggtgccacaagacaaatcataaggccggcaaggatgtacttcctccagcttgtgagcatgttttctattcactctcctcatttttagtagtttttacatcggtaacttttaacaaatgtttaggagagcacacaaaaaaagaatgcccgatatgggcattctttactggattcggaacaaacaatatgccggcaagcggaatcatgcgcttattttgcgcccgctgtgtcctcttgctgaattttttgcatttccgtgtcaattttttgtttttcctgatctgtgagctgatcattgtatttaaacgcagacataaacataaataccataatgatcgcggcaaacggccatcccgctttaatgattttcatttgtttttcactccgctttcttttttaagatatcgctgtgatccacatcaaacgttaattttccatccttgacgctccacttgaaattcgattctttcgtcagttcacgtacgatcgttttatgattgatgctgccttttttaaccggtgcaggcgttgcttcatgaatgttcatcggcgtgacttcaaagcgtcccgtgccgtttttctggagatgatattgaacaagcgccgtgtctctcgttcttgtccacccctggtcgaatacgaagttgcccaggctgtagaaaataacggtgccgtggtacatttcgatcggttccagcacgtgcggatggtgtcccacgataatatccgctccggcatcggacattgctcttgccaattggcgctgtctgtcattcggatcattatcgtattcctgtccccagtgtgtttgaacaatgacaagatcggctttctttttggctttagaaatcatcggaataaacagctctggatcggccggaagcacacccggcgcatttcgtttagctgcaaaaccttttccggaaacatcagtgaaacccagtgttgcgattttgattccgtttacatcttgataagaaatgttctgctcggcttccttcagcgtgaggcctgctccgacaagttcaagattttgctttgaaaactcttcaaccgtatcccgcattccttgagggccgtaatccatcgcatggttgttggctgccgtgagaactgtgaaattcatgtccttcaatacttttacggcatctttgtttgactgaaggtggatatttttttctgcttctttgtagttctttttatatgtaaccgggttttcaaagttccctgacacatagtcggatgattcgaagaatggctttgcataacggaagacactctccgtgcctttatgctttgtcactttctcgacattccggcccatcataatatctccgacaaatgaggctgatacaaggtcatcggcatttcttttcacactcggcgtttccgccttccctgtcaggatgcagacgaacatcaggcaaaagacgattggcagcgcgataaaaacgtgaagattggtcttctttttctgctgtttggtcagcttcagcagtttttcttgaaagcttaattgttttttcatcgtttgacacaccttacattagattaagtagtaagcaaacataatggcaaaagttgcgccgcttaagaacagcgtgctggcgaaagtaatcgttaatccctgtttctgaatggtattggcgatcagacccggtacgatgataccgattccgcggaattctgatatctcaaacggtacgatcgggtaaagaaaatcaagggcgatttttaagcagattcccgttatcagcatagctgcgaattttctgcgtccgtacaatatcataaatctggataaaccgtatttgacgatcacgtatgtaagaagactcaccagcagtacgagtaaaataaagaccggctggttaaaaacgagccctaaataacccggcacaactaaaccggcaggtacgatacctgttttttccgcgaaaattaaactgattaacacgcctaaaataagtgaaatgtataaatctgatccgaacatttatccttttcctcctagctaacgagctgtttcaccttatactcttggattttttcaattaatggttccgctgaaccgtggatattgccgacgccatatatgacacggttttgcattcttgttttcagcacgtccatgatttcgtctgttgatttatattccagatcgtgcagtgtatcggcaggaatcttgccttcttcataagctctgacgatcggttctgtcgtctcgccgatgagtatgagttccttcgttttaatgtacggaagcacgtcgtttgcgaactgaatcgttctgtccacacggtcggcgcggcagttcatgatgacgatcggttcatctgtcgggtagccgatttcctttacacgtttccatatatttaaagtagaagatgcatcatttgcggcaaagccgtttacgaaatgaccgggctccttcgtgctgagcagcggcaggattctcatggcgccaggatcaggcggcgcgttcagcattcctttaaacgccgtttcttcatctatcccaagagcctgggcaacgccgagcgccagggaagcgttatcaggaaagaccatatattcaaattttcgaaggtattcatctgtaattttagagttatccgcaataatgacctcggtattccgctctgcggctttttctttaaagaagtctgtgtattcactgtctgtaatgacaaggtgaccgttatacggtatcgtcgcggtaaaagcttcagcaatctcatcaagcgtcggccccatgacatccatatggtcttcaagcacattcacgatgacgccgatgttggcttgaaggagttcttcctgaaagataatctgataatccgggtttactgccatacattcactgacaatggcattggcgccccgttctacggtttccttcattacttctttttgctcgccgatattcgggccctgcggtttccgtttgatcggtttctcctcaggtgtatcccaatagatcatccttgcatctgttcccgtcgtttttccgactgttttgtagcccgcctccatcagtattccggtcgtcagcctcgttacggttgactttccgcggataccattaatattgacgcgtactggcagagcatcgatattcttctgatgccgccttttttcaatgattccgatgattagtacggcagcacaggctataatgagtaaccacattgatttttgacatctccttctgtattgataaattcattcatcagtatatagcttcactatgaattctcaatcggcattatgtaacataatcttcccgctttcactgagccaaacttctctattagtgacgctattcttcctattatcgaattgctttttttgggaataggcaggacttaaaccttacttcaattttttaaaagaaaaatgtatgcgtttacatttccgcacataaattcatttggaccaatgggactatacgcgttccggaagaaaaagatgtaatgataatccatcttttacagcctgttatatcagcgttttccgcactgcgcatacgtttcgggactctatgtccgctgtgtgcagactgcctgttttgttaaggataaggtcttaaagtcattcatttttcccccgtatcctgctttcagtcccattccaaaataactagcggaatgactggtacgtgacagaaaaagacgggtccggagtgtttacaagaaatacacattttatatgcggaaagcctatctccttttaaagcatttacaggacatttatcactcttttgaaataattttaataaatctttatattcgttcaagaaatattcatccataattgtgaagttcttggtaaaacgtcgagaaactcctctattttataaaatgcataaaaaaggaatacccgctgaaaactacaaataaccgggaaaggaggcggtctgatgtctgcggataaacaaaacaagcggatttccggcgattttgaatcggctgtacgggaaatgcaggagctgatgtgtgtttgcggtgattttaaaatacgaaggatcaaactgcaggaccgtcataccgctttcttttatattgaacaaatgatagaagaacagaagctgaatgagtttctgttaagcgacaccctgcagaacggtccgcttgaggaaacgatgaatgccgtcagcagtgcggaaacggatgaaaccagaaaactcattgacgggattttggcaggccaggttgtttttctcagcgatgcatcaaggaaagcgaagctgttttccgtcgggcagaatccgctgcgttccattatggaacccgaatctgaaagtatcgtccgcggcgcccatgacgggtttgtggaaagtttggaaacgaacattcatcagctgcggtttcacatacaggaccgccatctctccgttcattatatggatatcggggaaagagccaaatcaaaggttgcggttatctttgttgagaatatcgccaatccggagattgtggaggaagtgaagcggcgcctgtcatacctgcgtatagacagcgtgcttgcgcccggaattatcgaggagtcgatagaagataattcgttttccatttttccgcagatcgttcatacggaacggccggataaagcaaaagcatgcgtgatggaaggctgtgtgctgatcatgatggatggcagcccgtcggccttgattgcgccgatcacgttcttttccttttttcaatcgccggatgactacagcacgaggtggatttccgccagttttttgagagtgctgagatttttcgcctttatgatcgcgattacactgcccgctttttatatcgcgctgattgcgtttcattttgaagtcattcccaacgatttgattatcaccatgaaaaattcgattgttgatattcccttccctccgctgatagaggccatgattatggagattacgattgagctgatccgcgaagccggtatcaggctgccgaaaccgatcagtcagacgatcggcattgtcggcggtctcgtgatcggtgacgcagtcgttcaggcgggactcatttctaatatgatgattatcgtcgtggccgttacggccgtttcttcttttgtgcttccttcatatgaaatgagcacgtccattcgaacgctcagatttccgcttatgtttctggcatcctcgttcggttttatcggcatcgcattcggcttcggacttattctgatgaacctgtgcaagcttgaatccctcggcgttccgtatttatcatctctgacgccgtttcatttcagtgacttaaaggatgcatttatccggctgccggcctggtttattaaaagaaggcctttttatttgagaccgcaagattcaaagcagataaaacatgttcgggggtggagaaaagatgaagcctaaaaaaatcagccggcttcaaggcgtgtttttcattaatcagacgcagatcagcatcggcattttggcgctgccccatttactgatgatgaaatcgggaagcagcggatggatttccattctgcttaccggattgctcgtccagcttaccttcagcctgtatatgatattatttcaccggtttccgaagctgaacctgtatgaaatgctggaggaggtgttcggaacacttgccggcaaaggggtgcaggtgctgtatattttatatttcgcgtttctctgcacgctcattctttctgtatttacacggttattggatatctgggtgctccctcagactccgaattgggtgatcagcttaatgctgatcctcggttctgtctatatcgcccaagccccgctgaatgcgatcgcgaggttcagctttattttaacgccgtttttgctgctgatctctctgccgcttttatacacactgggaaaagccgatatcacatacattatgccgatttttcacggaaccgcaaaagacatgcttaccggggtgcagcaaacacttgtcagcattaccggctttcaggcggcgcttgtgatcgggccccttatcaactgcaccgtcagccagcgctacaaaatactgacgatttcaaacggcttgattatcctttattacctgtatatcactcttacttgctttgtcaccatcagccccgaagaaataaaaatgatcccggagcctgtgctgtacctgttaaaaaccgtttcattcagaattatcgaacggacggatctgctctttttgacgttttggttcgtgaccgtcttttcaacgctggccaacgtgttttacttggcaagcaccggcatcgccaagctgttcaatcaaaaagatcacagccggtttgtttatccgctggccctgctcgtcttccttctgtctatttgggccacaagcacagataaaacgatacagcagctggatcagtttttccgcatttccgatattgtgtttgtgtatttgtttccgttgtttatggtattgattgtccttgtacgcaaaaagggtgtccgccatgcgcattaaaaaagcggttcttatcagtctcatgtgcgcaagcctgacacttgccggctgctgggatcaaaatttgttgaaagatatttctctcgtgctgaccgcaagccttgatgttgatcatgacggtaaaaataaaatcggcattacctatcggaaggttcagtcctcccaggcggaacaggaaacgggcggctcattcattacgacggtgctcagcgcttccggacacaccatccgtgaagcgcggtttcaattggataagcttgtcgaccagcgcattgacacgtccaagcaaagagtcttattaatcggtgagaaaatggcggaaaaaccgctttttccttatctcgatgtcttttacagagatccgaaaagtccgcttctcgctcatccggcggttgtaaaagacggcgaggcgattgaagtgctgaagctgatcgtccggcagaaattgatcgtcagcaagtatttaacgaatttattaacaagcgctaatgcggaatcaaatatcagcatggaaaatttgcaatccatccgttcaagcatgctgacggctgataaggatttcgcccttccttatttatcgattaacggacagacgataaaggtagagggttctgccctgttcagcggacagcggaaagtgactgaggtgctcggtcaggattcgaccctcctgacccttttaagcgggcaatttaataaatcggctaatattaatctgaagctgtgggacaaatacaaaatggatattgaaaattatctttctctcggcatcacggatgccacgcgaaagattgtatttatagatacagatccgcagcatataaaagtgaaaatccgtttaaagctgaatgcacgcgtcttggaatatccgaaggacaaactgaattcttatacggcaatcgaccaaatgaacaaacaagcatcagcaaatttgaacagccaggccagatcggtgatcagccatattcaggagcacaactcggatatcctcggcatcggccggaaatatcaaacccattattatgagcggggcaagcggctcaattggcgtgaggtctatccttccatcgagataatccctgatatcaaagtgaatatctcgcaaatcggcatcgtgaactaaaagagaccccggtctctttttttgttgccaaccgaaatgattcgtggtactctttttgtgtaaacggttacataaatgaagggggagtgtttgttggtaacgattaaagatgtcgcaggcgctgccggcgtctctgttgccacggtctcgcgtgtcctcaatgacaacggctacgtccatgaagatacacgaacgaaggtcatgcttgccatggagaagctgaattattatccgaatgaagttgcccgctctctttataaaagagaatccagactggtcgggcttttgcttccggatattacgaacccctttttcccgcagcttgcccgcggcgctgaagacgagctgcagcgggaaggataccggctgatcatcggcaacagcgatgaagaattggaaaaagaactcgactacctgcaaacatttaaacaaaatcaagttgccggtattttggcggccacccattaccccgaccttcccgaatacagcggcagcctttacccggtcgtatttctggaccggacaaaagaaggcgccccatccgtattcagtgacgggcgggcaggcggaaaacgggcggctgaggaaatgcttcgcggcaaaagcacaagcatcacgcttgtcaaaggcccaggccaccttccgaccgctcaggaacgttttaacggcgcacttgatgtgctgtataaagcgggcgcgcagttcaatgtcatctccgccgcttcattttctatcaaggatgccgccgttttagcagaaaaattgtttgcagcataccccgaaaccgacggagtcattgccagcaacgatattgcggcggctgccgtcctccatgaggcgctgcggctcggcaaaaaagttccggaggagattcagatcatcggatacgacgatattccgcagagcaggcttttgtttccgccgctttcaaccatccgccagcctgcatatgagatgggaaaacaagcggcaaacctgctgctgcaattgataaagaaagagccgccgaaagagacggccattcaactgcccgtgacttatataagaagacaaacgacgagaaaggatgatcaccatgagtgaaatttgtgttatcggaagctgttctatggatctggtcgtcacatccgaacggcgtccgaaagccggagaaaccgtactgggcacagactttcaaaccgtgcccgggggaaaaggcgcaaaccaggccgtagccgcttcccgtctgggcgcaaacgtatatatggtaggaaaagctggcagtgacagctacggaaaagcgattattgaaaacctgaaggcaaacggtgtcaatacggactatatggaaacggttacacataaaaaaagcggaacggctcatattgtgctcgcagaaggagacaacagcatcgtcgtcgtaaaaggcgcaaacgatgacatctcacccgattatgccaaaagtgcgctggaaaaacttcccggcattgatatcgtgctgatccagcaggagattcctgaagaaactgttgaagaagtgtgcagctactgccgcgcgcaccaaattccggttatcctgaatcccgcgccggcccgcccgctgaaacaatcgacgattgagaatgccgcatatcttacgccgaacgaacatgaagcatccattttatttcctgaccggacgaaagaagaagcgctcgccggctatcccggcaaactgttcattaccgaaggaaaacaaggcgtacgctactcagacggcaccgcggaacggcttgttcccggcttccctgcagaagcggtcgacacgacgggtgccggcgatacctttaatgcggcacttgccgtcgcgctcgcggaaggacgggacatcgagcaagcgctcctgttcgccaaccgcgccgcctccctgtccgtgcagcacttcggcgcccaaggcgggatgccggtcagaaaagaagttgaggagctgctgtcatgaaaaaacacggaatgttaaacagccacattgccaaagtattagccgatctcgggcatacagacctcatcgcgatcgccgatgcgggtctccccgtccctgacggcgtccctaaaattgatttgtccttaacggcgggcattcccgcctttcgggatgtgaccagcctggtagccggggagatggccgtcgaaaaggtgatggccgcctccgagatcaaagacgaaaatcctgagaatgcaagtttcatagaaagccatttctcagcgcagacgatcgagtacatgtcccactcggaattcaaacggctcacacagaaagcaaaagccgtcatccggacgggtgaaatgacaccatacgccaactgcatcctgcaggcgggtgtgattttctagaaagaagggatccagcatgcacatcggcatgacagacattcataaagcattcggcaaaaaccaagtgctatccggcgtctcatttgagcttctgccgggagaaatccacgctttaatgggagaaaacggagcgggcaaatcgacgttaatgaatctgctcaccgggctctaccggctcgacaagggaaacattacgataaacggaacaaatatgaatttctccaatccaaaggaagccgaaaagcacggaatcgcctttatccatcaggaactgaatatatggccggacatgacggtgcttgaaaatctttttatcggcaaagagctgacgacggcgttcggcgttttggaaacgaagaaaatgaaagcgctagcaaaatcacagcttgaaaaactgggagtctctcttcctcttgaccgggaagccggacaatgttccgtcggccagcagcaaatgattgagattgccaaagcgctgatgacaaacgccgaagtcattattatggacgaaccgaccgcggcgctgaccgaacgggaaatcagcaaactgtttgacgtgatgacggcgttaaagcgggacggcgtatccattgtctatatttctcaccgaatggaagagatattttcaatttgcgaccggatcaccattatgcgggacggcctcactgtcgatacggcgcatatgaaagatactcattttgatgaagtggtcaaaaaaatggtcgggcgggagctgaccgatcggtatccgacccgcacgccgtcactcggcgataaggtgctcgaagtgaaaaacgcctcaaaaaaaggaagattttcacagatcagtttccatgtgagcgccggagaaatcctcggcgtttccggcttaatgggtgccggacggacagaaatcatgagggcgctgttcggaattgaccggctcgattccggagaggtctggatttccggccgaaaaaccggcattcggggtccgtacgatgccatccgcaagggactcggcctgattacggagaaccgcaaagatgaagggctgctgctggatacgtccattcgtgaaaatatctcattgccgaacctgaccagcttctctccgaaaggcatcattgaccgaaaacgcgaggcggagttcgttgagctgctcatcaagcgtctgaccattaagactgcatctccggaaaccgccgcccggcatttatcaggaggaaatcagcaaaaagtcgtcatcgccaaatggatcggaatcggcccgaaagtcctcatccttgatgaaccgacaagaggcgtcgacgtaggcgcgaaaagggaaatctattcattaatgaatgaactgaccgatcgcggagtcgccatcatcatggtgtcttccgagctgccggaaattctcggcatgagtgacagaatcatcgtcgtccacgaagggcgcatcagcggagaaatcaatgcggcagatgcaacacaagaacacatcatgacacttgccacgggagggcagcagtatgaaaactgaaccaataacatcaactgaacaaaagcgattttccattcataccttcacgcaaaaactcggtccgtttctcggcttactgattcttgtgctgatcgtttccgttttaaacccgagttttcttgaacctctcaatattctcaatcttcttcggcaggttgcgattaacgctctgattgcattcggaatgacgtttgtcattttaacgggaggcattgatctctctgtcggagccatcctcgccttatcgagcgcagtggtcgcaggtatgatggtctcaggcatcgacccgatcttagccgtcatcatcggctgcgtgatcggcgccgtactcggcatgataaacggattattaatcacaaaaggaaaaatggcgccgttcatcgccactttggcgacaatgaccgtctttcgcggactgaccctcgtctatacggacggaaatccgattacggggctcggttcaaattacgcatttcaattattcgggcgcggttattttctcggcatccccgtacctgccattacgatgctgattgcatttgcggccctgtgggttcttctgcacaaaacaccgttcggccgccggacatacgccatcggcggcaatgagaaagcggcgctgatatcgggaatcaaagtgccccgcatcaagatcatgatctattctctgacaggtttattatcggcgctggcgggagcgattctgacatcacgcttaaattccgcacagccgacggccggagaatcatacgagctggacgccatcgcagcggtcgttctcggcggaacgagcctgtccggcggtcgagggcgcatcatcggtacgctgatcggggttttgattatcggtacgctgaacaacggcttgaaccttctcggcgtatcatcgttttatcagctcgtcgtcaaaggaatcgtcattttaatcgcggtgctgctggaccgcaaaaaatcggcatagtaggaggaccattatgaagaaagccatcatcacgatcgcggcattatcactgtttttgctgtccgcctgttcacttgaaccgccgcaatgggcaaaaccgtcaaacacaaaacataaaaaagaattcactatcgggctctccgtctccacattaaacaatccgttcttcgtttcattaaaagaaggcgttgtaaaggaagccaaaaaacggggcatgaaggtcattattgtcgatgcccaaaatgattcatctaaacagtcaaatgacgtagaagatttgatccagcagggagtcgatgcgctgctgatcaatccgaccgattcatcagcgatttcaacagcagtcgaatcggcaaattccctcggcattcccgtcattgcgctggatcgttcagccgaacacggcaaagtcgaaacgcttgtcgcctctgacaatgtcaaaggaggagaaatggcggctgactacctcgccgatcagctcggaaaaggcgccaaagtggctgaattgcaaggggtgccgggcgcatccgcgacacgggaacgcggaacgggctttcatcatattgccgacaaaaagctggatgtcgtaacaaagcaagcggcagattttgaccgcacaaaaggattgaccgtcatggaaaacctgctgcagggacacccggatatcaaagccgtgttcgcccataatgatgaaatggcactcggggcgctcgaagcgattaacagctcgggcaaacacattttggtcgtcggtttcgacggaaataaagatgcgatttcttccattaaaagcgggaagctgacagccacggtcgcccagcagccggagctgatcggaaaactggcggccgaagcggcggagcaggtgctcaaaggaaaaaaagtcaaaaaaaccatttccgctccattgaaacttcaaacgcaaaaataaccggctgatgtttagacttccggtaaaacgtgaaaggatgaagtaaaaggagagatacagatgaagaaaacagccaaagcggcatccattctgacccttgcagcgggaatatcagcggcttcagctgccggaataacgcctcttcccgagacacacgcgcaagaagcggtcaaaattgacgatctgtacagctacccgcttgactcttatctcgtttccgcggaagcattgaacgtgagaacaaaagcatcagcagccagtccgagagctgatacccttcatttaggcgacagcttaaagatcgtttcattccagaacgctgactgggcaaaagtacattataaaaacggaaaaacaggatttgtatctactcattatattgttaaagaagcaacaaccgtaaaaacgacggcaaaaacaaaagtatatacagacaaacaagcggtcacagcttcccttgccaaaaacacgagcgtttctttcctcggatggaaaaagacagccggcggcggcattgatttcggctgggcgcttgtcgattacgggggcgcaacgggatatatcagcacaaaagatctgcaaaaactgacataatatcaaaacggatttcgcaaattcagcgcgaaatccgttttttctttcttgagcagtcagaaacgtctaaggttcgaaatatttctcaggaaatattgtcggatgaagatgaatgcatacgactctaaaatggcttctttatgtaatccgccaggcgtttggcgttgtcacggatagccgcagcatcggcgctgctaaccccgtacatcgcgaaagccggcaaataggtcattcccgtaaaattagccattgcctgaaacggccttaagagctcgctcagtgaaaaatggttggacccgcctgcctgatatgcatcctctccggcacctacagaaacagccagcagcaattctttgccgtgcagcgcctttcctttggaaccgtaagcccagccatacgccagcacatgatccatccatgtttttaaaagcggaggcgcactgtaccagtacagcgggaattgaaatacgatccggtcatactgttcacacagctgccgttccttttccccatctattttcccgtccggatattctttataaagctcacgaaccgtgatgtcatcatgattttttaattcttctgtccacgccttattgaccgctgagttgtccatgtcaggatgaaccgctaataccaatactttcacagctaccacacctttcccttttgactgtattttacctaatctttgccggttcagccaaataaaaagaaagccccgagaaaaatgaggctttcttttttattttattccgggcttccttcggttgtttcaatatccttcgcaaaattcggattatctaaatttgcgttgaaaaagtccgccgtattcggaagcttgaggttcatattcattttttgagaaatggtcactttacaatctttaatgacatagtcaaacacgtgtcccccggaattgcgtccttcatcaatgaagtgcaggtgatatccggaaacagcgatgccgtttgcgtaacccggcgtccagaagccggcgattgtaccctgaatgtcgtcaaagttgaacacaggctgtgttttcaccgcttcaatcatcggaacgtacggtttctcctggcgttctaccgttcttgtctgcacctttttaaatacgccgtctaaacggatcgcataaaataagtttttactaggcagaaggctggcgatttcctgctcgaattcttcacgggtcatttcgccgtcgatcgtatgcgtcatgtccggcgtgaaaaatgtgaatgagcagaatggtgacaggtctccgcctttaacaggcgtagccgttccgtcgccgcgcagacggtaaaattcgccgtcaaatccgattaattcgccgtccagtttattgaacgtgccgatcccgaaatcaccgaacttcggaatgtcagccatatcaaaatctccgtcatacactccgtccagcagagatgtcatggtggatacttgatagatttgatcctcaggtgagcctttttctccgcggctcatcatatggatgtcgcttgcgtttttcatattcccttcactccttttaaattgggctgttttagaaaacaggtcatggtgcgcagagtgctagagagcttttgctttcattttttctttgaattgcttcggaagcatgtcgcttgataaatggacattgtcactgtaatcgacaggaatgtcaatgatgacagggccttctgtgttcaagcctttttgcagcacgtctgccagctgttccggtgactcaacgcgcaagccggtggcgccgaagctttctgcatattttacgatgtcaatgtttccgaaatctacgcatgatgtacggttatattttttcatttgctggaatgcgaccatatcatatgtgctgtcattccatacaaggtgaacgatcggcgcttttaagcggactgccgtttccaattccattgcagagaacaggaatcctccgtctcctgaaacggatacgactttttcacccggattcaccaatgtggcggcaatcgcccaaggaagcgctacgcccaatgtctgcatgccgttgctgatcaacagtttcagcggctcataagcgcggaagtagcgggacatccagatcgcgtgagaaccgatatcgcaagtgacggttacgtcgtcatcaattgcattgcgcagttcttggacgatttgcagaggatgcactctgtcggatttatgatcgcttggcgccttctcgctgtctgtgagcatctgttttaactcgctcagcacttctttttcacggctgcccatatcaaatgtcacagcgtcgtgttcaatttgtttaaccgtagcggggatatcgcctaataattctaattccggctgataggcatgatcgatatcggcctggatttcgtcaagatggataatagcacggtcaccgtttacgttccagaacttcggatcgtattcaatcggatcataaccgatcgttaatacgacatccgcctgttcaagcagaagatcgcccggctggttgcggaacagtccgatccggccgaaatattggtcttccagctctctggacaatgtgccggccccttggtacgtttctacgaaaggcagttttgttttggcaagcagtttgcggatttgttttaccgcttccggtcttccgcctttcataccgactaacagaacgggaagtttcgccgtctggattttcgcgatagccgcgctgaccgcctcttccggtgcagggccttgtttcggcgccggcacgctgcgtacgtttttcacatttgtgatttcattcacaacatcctgcggaaagctcacaaaagccgcgcctgcctgacctgctgacgctgccctgaaggcgtttgttaccgcttctggtatattccctgtttcctgtacttctacactgtattttgtaatcggctgaaatagcgccgcattgtccaatgattggtgtgtccgttttaaccggtctgcgcgaattacgttacccgccagcgccactaccggatcaccttctgtattagccgttaacaagccggtcgccaagttggatgcccccgggcctgaagtaacgagacaaacgcctggttttccagtcagtcttccgacagccgcagccataaatgcagcgttctgttcgtgacggcataaaaccagttcaggtcctttatcttttaacgcatcaaatactgcatcaatttttgcacccggaatgccaaaaacatgtgtgacaccttgctccactaagcaatcaacaacaagctccgccccccgatttttttcagaggtttttagttcatttgttgcttttgccaacaccctcactccttattatgcatattaaatataaaattttaagtaatttgtgatattattcactatacactctttggaaattgacctccaatatcaattcgccgtatgattaatatgtttcacgaataattaacaaagagaaaggaatggataaggatggagcttcgccatcttcaatactttattgccgttgccgaagaacttcatttcggcaaagctgcgcttcggttaaatatgacacagccgcctctcagccagcagatcaaacagcttgagaaggaagtcggcgtgaccttattaaagcgcacgaaacgggttgtagagctttcagctgccggagaaagttttttaaaacacagcagaaacgcgatcgaagaaatagacaaagcgattgaaatggcgcagagaacggcgcggggagagctcggccgccttgtcgtcggttttgtcggctcggccacatatgaatttctgccgccgatcattcgggaattccgcgaaaaattcccctccgtcaagcttgatctgcgtgaaatttcttctttcagacagcaggaagaacttctgaaggggaacattgatatcggcatccttcatccgcctttacaacattccgcgttacatatggaaaaggtgcagagcagcccgtgcattctggctttgccgaagcagcacccgcttaccgctaaacagacaatcgacattcaggatttaaaaaatgaaccgattatcacactgtcgaaagaaacatggccgactttatacctggagtttgtaaactactgcgagcaggcgggcttcaaaccgaaaatcgttcaggaagcgacggagtatcaaatggtgatcggattggttagtgccggtatcggtgtaaccttcgtgccttcttctgctaaaaagctgtttaatctcgaagtcgcctaccgcggcattaatcaggcgcagctcactgccgaatgggtcattgcctaccgcaaggataatcaaaatccgatcctgaaacattttctggatattatgaataagcgccaggctttattgcaggcggataaggaaaatgcataaaaaagagggccgccgaaagcagcctcttttttttgtgcttttatggatttttactaaattggtagaaacgctcagtacaccttacgacctgtacccgtatacatacagtacaactgatcaggagggataaaaataacggggcggcaatgacccatcgaaaaggaggcagaacacattacacatattaccgtcattttgaccctgatttctttctttgtgaccattatttttatattttggagacccgggggattaaatgaagccgttccggcgtcgctgggcgccattctcgttttgttatgcggaaccgtttcctttcatgatttgggggatatagggtcaaaagtcaccggagcatcaataaccattatctccacaatgataatggcgatcgcgctggaaagcttcggtttttttaactgggcggcggccaaactgcttcaccgcgccaagggatcaggcatccggcttttttggctgaccaacctgctctgtttttcaatgacgctctttctgaataatgacggcagcgtcttaatcaccactcctattttactattggtcttacaatatctcggacttaaaagacatcagaaaacaccgtatttaataagcggcgtattaattgcgacggcggcaagcaccccgatcggcgtcagtaatatcgtcaatttaatttctctcaaaatgataggcatggacctttatttgtacaccaatatgatgtttatccccggcacgctgggactggtgtttatggcctttctgctgtttgccgttttctaccgccgtttgccgaaacagctccccgatattccggttcattttgaatcgctggaacacaaacgatatcatccgcttcagcctccgccagacttgtcccaaaaaaacagccgtacgaacatcatgttttgtgttttggtatttgtattgtttgtccggatcagtctgtttgcagcttcttacaacggcatatccgtttcgctcgtggctgtcatcagttcagtcatcctgctttgctggagatggttttatttaaaaatcggaccggcggacttattaaggaaagcgccttggcatatctttatttttgccttcacgatgtacattatcatttacggactgcataatatcggactgacggcattgcttgttcagtctattgagccttatgtctcacaaagcattgcccacgctgcatctattatgggcattgctacatccgtcctctctaatttgttcaataaccatcccgccttaatgatcagcactttgacattaactgaaatgtccatcgacccattaaccgtaaaaatcatttatctggctaatattatcggcagtgatatcggatcattgcttctgccgatcgggacattagccacactgatctggatgcatatcatcagacagcacggcgaaaaagtttcttggtcagaatatatcaaaacgaccattgtcgttgtccctctcaccgtcgtgtttaccattaccgttttatatgtttggatcagctggatttacctttagctatgaaaaaaaactgcctgctgtataagagaggcagttttatcatttatggcaggtgcatggtttttaaatgattcaatttccaaaagacagtatccccgtctgcattggtcaattcaagaatattatctgagacgtcctgtaacagccccactttattcggtatatctcctaaatccagaataatcagcttcccgacatatctttttaattgctcctcaaaattccggacaaggggcacattagcgggaacaaccggcagctctgaactgtttaatgtatacggcgtctgctcatcggaatagggtgtcagccatttcaaatgatgcatcgagatgaaaagagtcttataaaccggagagaagaaaacaaaataatcatttaaaacacttgtcacatacccatgaatggaacggtctcccgtaacgaaaatttctgtaaatctgccttttatatgctggagggtattccggtaagaaaaggaatgttcctgtttttcgggatgcggacttttttttcttgcgtacggttctttattctcttcgtccgggagcgtcaatgtcatcctctgaagatgcagcagcggaatataaagaaacgtccggccgtcatgaatcacaatgatatcctgaccgatatccaaaagagttcctgaaaatgtcgtattccccgatatctcaatatcgacttgtttatcaagaaatctgcttaatccagccatttcattcccccctctcccgcgtttacggacaatctttccaatcatttacggccgtgtttccacctataatctattgtccttaatacagtggcgtagctataagagttctcttcctcccgttttgaggatcgaacggatcttgacgatcttttcgactttttagaggaagtacgctgctcttcgcgagattcttcttcatgtgacttttcttcttcggcgctctctttcccgcctttattctcgtcgtctttattctcctcttttttggctgctccttttgccccttcgctgatgctcttgatatgaaaaggatagatccgcagcacttctttatctttcacaagagtgtagtggccgtcggaattatccacaagtataccttcaacggcttcaggacctccgcggttgatggatacccatttgtggatcaggcgtttaaatatgccgtgaaaatcatcagccatttcaaattccgggcgctcctcctcctggccgtcctcttcttgttccgcgctgatgcttttgacatgatcggcgttaaaatatacgattccgtcatcttctgtttccagcacgagaaaatcatcccctgtttcgtgaagctttcctcttttcgattccggacctccctgattcaattgcaccgtgcgattggtcatccggctgatcagatcttgaaaatcatcagctttttcacattctgccgcttcggccggcgatacggtttcactcgtattttccgtcacacttttcacgtgtttccattgataataaacgattttattatcaacttgaagagcgatataatccgattgaatgtctgctaatctccctgtcttggactccgggcctccccggtagacagtaattacttttccttccatcgcatgcaaaaagttgtcatcagaccgatgccgcttcgtattgcgtttcatctattgtcctcctagtcatttttctcataatgtaaaaagcataatgcatatatacgtatcacgattattttcgggaactgattcaccagcctatttgtaaaaaatctttcttcatttccaaatcagatattccaccgctctaactcactgctgatgaaggcggaccgctccttaatgtattcgcaaatcacatcaggctcccggtcaaagcaatcaatctcctctttcttataaggatcctttgcgacatgcggcctgatctgctcatacagtgacatgaccttcggcttcatatgttcaatggtaaaccgggtctgaagcgtttcttccaaaagctgtttgtacgctttgcggaaatacggttcatccagaagccttgcagtcaaggtattaaacccttgtattctgacataatcggcctccatccgatcaccgtgaatgtctcttccccacgtcgcatcgtaatcccacggaatgacttcaaaaagtcccgtttcatgattccggtacaaagcgtaattatgaacaaatccatcgtagtttgaggtaaacacgatgcccgcaagccaccgcaaatacttatcggcgtccaagtgtttgacgatctcccccttgaactctgacttcggaacggtattaattttatagatcatgtcctgcaagtataaatcgtcttctttcgttcccgttttcttttcataaccaagttcgagcgatgttttcgtatcccgctccagatcactgacaagggagaaattggcgtcgtcatcaaccgcgtaaaaaacagccccgtccgccaaattccgtttcgccagaaaatattcatccactgactccagctcaagatacaccccctcatgtctgccattgatttgcagggttacgaaattcgcctttggtgacagcgtcccaagctccgcgaagaaatcgagagacagcttattccgcatcatcgacggatctttgtattcagcgtttaaatgtatctctttcgccctgcgaaatgttttcggcgaataaaaagcgatgtgatacgattttttcttaaaatctcttatatgagagccgcggtacgccagatcaatgtcaagccgtttttgattcactctcagcaccgcgggcaccggatcatcatcccaaatgtcttttttcagctccattaagtctttcgggtgaataaacagctggtatagaggcaatgttgattggtctttcatcagtaaccctccctgtattaatttaggctgtgctatttatataaaactcagcgaatcacacatacacttttttcattcatgcgtactatgtggtagtaaggatcgcatccttaaaacatatatcatgaggaggtttcaaaatgggccactattcccattctgatatcgaagaagcagtaaagtccgcaagcaccgagggattggaagattatttgtaccaagaaccaaaaagcagtaagaagagaaaatctcgcagccataaaaaatcccgttctcacaaaaaatctcgcagtcataaaaaatcgtgccgctctcacaaaaaatctcgcagccataaaaaatcgtgccgctctcacaaaaaatctcgcagccataaaaaatcccgttctcacaaaaaatctcgcagtcataaaaaatcccgttctcacaaaaaatctcgcagccataaaaaatcgcgccgctctcacaaaaaatctcgcagtcataaaaaatcccgttctcacaaaaaatctcgcagccacaaaaaatcatgccgccgcaagaaaaaacgcacgcagaaaaaaccttaccgtcctcataaaaaagacccttgcaaaaaagacgattactgcagcaaaacagagtactggaaagacgggaacatctgggttgtaaagaaaaactacaagtaacgccatttgtaaataggctgccggctaaacggaagcctttttcctcaatcagatatatgccacgtgataagatatgcagccggttttcttttgttgtgtttccgaattttctttctgtataatcaggtcatacgataaagaaaggcggccgaaatcatgcatatcttacgagcagacgaactgaacgcaaaagacacctacaaattgctttcgggcacagtcgttccccggccgatcgcatttgtcacgacgcggtcatccatcaacggcgccgtaaacgcggcgcccttcagtttctataacgttgtctccgcagaaccgccgcttctggccatctctgtcagccgcgcggacggacggcagaaagacaccgcgagaaacgcaatcgctcatcgggaattcgtggtgcacgtcagtgatgagtccattattgaagacattaacaaaacggcggcaaggcttgatcctgatgtcagtgaacttggcatgacagacctttctgtgacagacagcgcctgcatcagcgttcccggtataaaagaagcaaaagtcaggtttgaatgtatactcgaacgccatcttccgtttcaaaatgacagcggagaaacgacgacagacctcatcatcggcagagtcgtttgttttcatttgaatgaccaagtatatgacgccgataaaggctacatacggacagatgagctgaagcctgcggcaaggctcgcggggaatgaatacgtcagactcgggaagacatatacgcttgtccgcccgacctgaagcaggaaccattataatagaagaaactagtcaaaaagacccctttcgaaaggggtcttttttgagtcttttaccattaaactcagcctaatgtcttatagaatgctgaaacttacaaggccctcacccatatgaaacgagtgacatttttaggaggagacgatggatttcattcagttactgattttttcagccgtatttattttgctcagccttatgtttcaagtatttgccgtcaaagttcttcattttccaaaggctgttaaaaagcagaagccgataaacggcacacatcgattaatcgaaatcacactgcttattacgggcatcgcagcggtgactttgttcaatgaaatgtacgtatttgcgggagttgttttcatgctattttgctgcagcggcttaatggaatggcggcaccggcgggaggaaaagcaatatgtgtacgattcgttttacgcaggtctttctgccgctcttggcgtgcttatttttttcatcagttagcgtatcatgctctatactcctgcggccgctccgtcgccgcgcgggtcggccccgccttggagaaagccttcttcatcaatgacgatcgctgccgcatggcccataagcccgtcaaaatcaccaacggtctcgacgcggtggccgctctgccttaaggcttctctcgtttcagggctgattctgctttcaaccctcagcccttcatactcctctccccatgtccgcccccagacccagcgcggctcattgatcgcctgctgcgggtccattttgtaatcaatgatgcgcgtaatcatcgctgtctgagtttgcggctggccttctcctccctgggttccgtacaggatgtgcggctttccttctttacaggccatcgccggcatgagggtgtggaacgtccgcttgccgggttcaagtgtattgacatgggattcatccagcgaaaaaaatgacccgcggttttgcagcagaatgcccgtctcccccgccgtaacggctgacccgaattcaaaataaaggctctgtataaaggaaacggcatttccttccgcatctctgacggcggcataagcagtgtcgcttccgaccggacggcttagcgccggcgcagccgtgtcaccgatttcttccgccagctgctttgcataccgtttatcaagcagccgatccagcggaatatgagaaaatgccggatcagtcagcacttcattccggtgctgaaaactcttcttcagcgcctcgatcagcagatgataatagtcaaaggagccgtgttcaatctgagaaaaatcatagttttccaatatattgagcgtcattaagcctgtaaagccctgtgaattcggcggagcctgatagatgcggtatccgcggtaatcagaggataccgggttcgtccactcgccgcggtgggctttaaagtcatcaagtgtcagacggctgccgttgttttgcagaaaggatgtgatgctttgagcgagatctccttcataaaaagcgcttctgcctttctcggcaagctgttccaagctggccgccagattcttctggacaaaccgttcaccgggcatgggcgcttttttgtttctcgtaaaaatggccgaggtgtaaggcatcgaggctaaaagagcgagattgcgttctgtgtgggcgcactggtcggcggacaccgggaatccgtttgccgcataatcaagagcaggcttcagcacctcagcgagcgaaagacgcccgtacgccgaaagcacggcatcccagctgtccgccattcccggaacggtaatggcgctttctggcccgcgcagagggatcgcttctctgccccgatacaagtctctcgtcacatgcttccctgaacggccgctcccgttataagctttgattcgtcccgtttctttatggtaagtgagccaaaatgaatccccgccaagacccgtcatatgcggatacacgactgccaggcaggcgctgaccgccactgccgcgtcaaacgcgtttcctcccttttccagaatgccggcccccgcctgagaagcaagataatgcggactgacgaccatttgtttcgttccgatggttgaagtattcatggcaagcccctttacaaattttcctaagtataaaaagcggcttcaccggtatccaccttcctgaaagaaaagctcacacactatttactttccgataagaaataatcctaagttattacgtaacgaaaacaataaaaaaatttccccttcataccgtaacatttcatgatacaataatatccaccaaatgaaggaaggtgaagccggttggaacatgagtacagcattccgaatcttgtccttgatgaaacggataaacagattctctcgattttgcacgaggaagggaggatttcctatacagacttaggaaagcgggttaacctgtcgcgagtggcggttcagcaccgcattcagcatttactggatgccggtgtgattgaaaaattcaccgctgtcatcaacccggcgaaaatcggccgtcatgtgtccgtgttttttaacgtggaggtggagccgcagtatttggaggaaaccgcattaaagcttgaaaaggagccggcggtgacaagcctttatcatatgaccggaccgagcaagctgcatatgcacggcattttcgcaaatgatcaggagatggaagagtttttgacaaaacggctctatacgcaaaaaggcgtcgtcagcgtcgactgccaaatgctgattaaacggtataaaagcagaacgggcatgaagctgtaaggaggacatagccatgaaacatccctattgggacattacggcggcgatggtccgaacgggcattctcggattcggaggcggcccgtcggtgatcccgctcatccgccatgaagccgtcaataaatacaaatggatagatgatgatgaattcggagaaatattagcgatcgctaatgcgcttcccggaccgattgccacaaaaatggctgcgtatctgggcttcaagctgaaaggcacgttaggcgcaatcgcggcaaccctcgcacatattctgcctacatgtctcgctatggcgggcttgtttgcggctgtcaatgtcttaagccgctcagcaatcgttgccggcatgattggcgccgtaacaccggtgatcgccgtcatgctcggcatcatggcgtacgagtttggccaaaaagcgcttaaaggtttcggctgggtcacgggcatcctgttttttatcatcgcttttatcggcctgcaaacgttacagatcaatcccggctttgtcattatcattttcttggcatacggcgcgtttcattttaaattaaaggacaaaatcacaaagaaacgttcaaaagataaaggaatgccggcctcatgatcttgatttatgtatttatggcgtttcttgtcgcaaacgtactcggatatggaggcggaccggcgtcgattccgctgatgtttgaagaagtcgtcaacagatacagctggctctcaaacgatcaattctcaaatatgctcgcacttgcgaacgcattgccgggcccgatcgcaaccaaaatcgcggcgtatgtcggctacagcgcaggcggatggcccggattcctgattgcgctgatcgccaccgtcgtaccgtcggcgctcgcattgatcatcctcttgcgcgtcattcagcgcttccgccaatcccccgtcatcaaaggtatgacgctgtccgtccagcctgtcatcgccgtcatgatgctcattcttacctggcaaatcggcgcagacggcatcaaagcgatcggctgggttcaagcgatagtgattgcggggatttccctccttgtcttgacaaaattcaagatgcatccggcctttctgattatcgcggcgtttttgtatggagggcttgtgattcctcatttataaagaaaagcacctggacaggtgcttttttattttggcccggaaataccatttgatatgacaactgtttcttcgcctgcatcactcttgatgatttgcttgacttgcagcgttgcgcctgccattctcacagattgctgaacctgaggtgaattggtttcagcctgtatccaaacagaagtcggcgctttccaagctagaaagagtgcaagaatcaacataccagagataaccagcagcagcttcatatcgcatcacttcttttcaataaacggctcgcagcggacagcgcctgttgatcatgaagaatatcacccggacgattgccttctcccagcacatagcctttaaaggacatccccataaaatgaaaaatatgttcaaattgctgaatcagcggcagcccttttagtttagggttgtctccgcccactgctgttacatatgcctgcttcgctgacatttgctgtttaaaatcaggaaacctcggatctctcagcgtctgtgaccagcgatcaataaacagctttaatgtccctgacatgccaaaccaataaattggggtggcgaatacaagaatatcacacggtaatatcagctcaatgatagaatcgtagtcatcttgaacaggacgaaagccgccttgggcgtgacgcagatcttcaattggccggatccgatatttccgcaaatgaatgtgctccgcatcgaatccttgaacagccttctccgcaagaatatccgtatttccgccaggcctcgttccgccatgaataaccgcaatgttcatgatgcatctgctcctttgtttacgaatgattttcttcatcatataatggattcatcaatcaatacagatgattatttcgattattccaatcgataaaaccgatttagaaagggcgagatcaaatggaattgaagcagctgatcacctttattaccgcagcagaacacgtaaacttcaccctaaccgccaagatgcttaactatgcacaatcaagcgttacctctcagatcaaatcactggaagaagaaatcgggactcctttatttgaacggctcggcaagcggcttttcctgacagaagccggcaaaacgttcaaatcctatgcggagaagatcattgcgttaacagaagaagcaaaaatggccgcaaatcaagcaagagaaacaaccggaaccttgaaaatcggcgcgacggaaagccagtgcacataccgccttccgcctatcataaaagaattcaaacaggcttttcctcaagtaaagcttatattcaaaccgtatatttccaacgaacaagcgaaagaacagctcttgcagggccagcttgatatcactttcattttggatgtgaatcggtcggaagacgcactgcacgttgaatctctgattcaggatgaaatcaaaatggtagccgccaatgaccatccttttccagcagactcaccagcagcattgaaggatcttcaaaatgaaacccttctgctgacagaggacggctgttcatatcgcacgctctttgagaacactttacatgacgccggagtctaccctaataaattagaattcgtcagcatagaagccatcaaacaatgcgtgatggccggactcggaatcggactattgcctgaaatgacagtaaaagacgatattgccgaaggacggatgaaagaactcaactggcagaatgaatgccccgtttttactcaactagcatggcataaggacaagtggatgtctgcgccattaaaggcatttatcgatttgacgcgaaaaacattcaaataaaaacctgctgcaaggacgacaaggttttttaaagcagacaccaggcatacaaaaaaaacacttggtggcttagagctccaagtgtttcatgtgatttttccgataaaacgttcgcaaaacatgcgtttcaaggtcagccagacggacagggatcggcagcctgctttctcgattgatcattttcattgtgatctgatagctgctttctaaatcaatgttatgtccgcaagacaagaagataggcttcacgtcccgccgtgtccgaagcgcccagccatatacctcgccgtcaatgagaatatcggtgtaggcgcctacttcattttcaggcatctcaaaatcgcagcctttgattttgagataggttttcgcaatcccaatcgtcggcttccccagaaaaaaagccgcatgggtggcaacgcccatatgattgtaatgcagatacccgttgccatcaaacaaaaacacatccggctccgtctccagctttttggccgcttcgatgatcagcggcagctcgcgaaacgcaagaaaaccggacacatacggcacgctgattttccccatgctgtgcactttttcaatcacttctgttgtatcagcgtcaatcacgatgatactgcacaccccgtacggttccccgtcctgctcccaataagcgaggtcgacgcctgcgctggtgttgacggagtctggatggatgacgggggataggttgattttatgtataagagattgttgagttcgaataaaatccgattcatctttttgttcaaaatcgtgaatttgatgtattttcatttcacttgttttcctctcttaaaatagtcttcgcgctcaatcgtcctgtgtttcgatctagcgaagactccatatgcttcattgaaaaaagcagatagtataatctgctttttattaaaattcatttttcatttctttcataaaaataagatccaattgtttaagtaattctttaagttcagtacacataatatcttctaaaggattttcccaatctttgttttttatcagttcaatgccataactgccggttggatccccttctgggtaccaccctacaagcagcaaatttttagttttatgagaaactgcaggagatcttgattaaagtcaaataaccaagcatcatcattttcctctagagttttagggtcagtatcttttaatggaatataatcaacagtccaccccgctggtatcttaagccttaagaaattgggaacatgttggcttaggtgctgcaaaccctctaaaaccccacttcccacagtccagatttgatattccaactcttccaataattgttctatttcattaaaagagtcttctttataaatcttatctgtttttaagcccgctactatgacatggtattaatcattttcaaatattaccttaataacagcattacgtttttcattttgtagttttagtaattcatatttttcttgcattcttttttctgaacttaaattgttcagtactacagaccagccattacagatttttaatggcagcaattgagaaatatggtctctatccataactgcttctccttgtactccacattgttaaattattataaaaaaacttgccgataacaacaaggcaagctcttaactatagcaattctaatacatcagtaaacaaggcatctcctaatgttaatctcctgttgaaaggctgtatatgtggcaattcactccactcatacacagtatcgtagtaatcatacaaataactgagttcgataaaccctttctcttgcattattttattaatatagttcgttccctgaatgaattctaaagattcagcggttcctacaatgtcataagcgccatctattaaatcgtgtcttagggaataactataatctaatacataaacaggaaccaatttagatactttcatattgatttgctgttctaaatgaaaaccattttccccagaaagatcttgcaaatggatatcaatttctcctgaaggattgtttaaatctctaacttcaatttttttcaaaccttttatttgattaaattcatcaggtacttttattttctctgcgcatttgctcttgtaccattcgtctaattccctattcacaaatagacgatgaagcaattcaccgatttcagggtattcattaataaatctgattccatgttccatagttttaaccatcccatcttcttgaaggctcgccttttttcgtctgcttaccagttacaggatcaaactctcctaaatgctctgttcttctgcggttccacttttctaatttaccatgctgggaatcccattgccaattaaacccatctctatctgaccaagattttctttttaatctttcttttatttgtatcatacctctttcttccatccagttagttggttcttttaaacgatatccatttgaattgtctccaactatcttctctttatcagctagcgcagcattgtattcttcagtccgtttctttttactgtagttagtaccattatgagcaacataatcattttgagtcatcccctcaggtttttccaaccattttggtttttttgactggctactcgccatcttcacaatcccaagttctttaacagccgtcttttccacatcgacacggactgttgggaatccgtacgtaaagccgttcgctgttactgggcgttctgcgtacacgcggacgtttgtcgggactttgaattgtttaactttttctagtgtcttgttagctttttgaacttttgaatgggttgcaagcggtatgcctttgtttacatgcttcgccaatgcaccggctccaaccaaactcagcgcagcttccagcgccccttgcttccgtttttcctcagacactttgtttccgaacatatcccgtcctgtgacggcttctgtgaatccgtttgaggcgacgaggccgtatgcgcccatttctgtcattttgagaatgtctaaggattttccggttttataggcatctaaagcatgttctgcggcaatgacggtttttccggttttgtaaatggcttttccgcctttgaaagcgcggcccgcccagccgacgaccggtatgaatccggcggcggccatcgctcctgctgtgacgcgttctgcggtggagagtttttcgccggtcaccggatcaacaccttcggctgctcttttataatcataatagccggtgacttcgccggtaaagttgcagatgccgtcccatgttttttcgtaccatggtttattggcttcttcttcagccttttcctgaagccgtcttgcttcggcctgctgggcttttgcgtcaatatagtccgtgccctgtttttctgtcgccatgacgcttttgtagatttcattgctgtggaaggcttttttgtcatagtacataggggaggcgcttttcccgttgctggtggcctgcatgagaagggaatatttgctgagcactgcgttgtccagagattctaagttttgatattcagcggtcagggattcatcaagcgtatcgactgccgtgatcgtgtcgcgtctggttttctgggcatcacccattttatctgcgtaatcatccagcgtatatgtatcgagatgaataatatcactgatgccagacaaaatcgaatcgatttctgctttatgagcggagacaatctctgaagctctcaaatccgcattgggcagctcatgctctaaaaatgaagtctccgcatatgaatcactgagctcttgatctttaatgtcacctgaaatgccatttaaaaacgcaatttgagcagagacaagcgtcagccagctgtcggcgatttccgcttgtccctgaaagaaatcctttatattgtctgcgcctttccctttcaaagcatcacccagatcggccacgccttgaaaggcttgtttgagcgcacgcagctgttcttcaagggcttcgtattgtttctttctcttatctgcttcgtccgttaacgattgtgattcaaacactttgctcatcggcaagtcctttctttcgttattttacagcgatcgcctcgtcctgttccttcaaagaatctacgttgtctttaacgtccgctatgttcttatgaacggcctgcttgtattcgctgatcatcgatacaagctttgcctcgcgggattggtatttggaggtatagtcgagcttgttttttccgtttgtaccggcgttcccgatagaaacggcctccaaagcgctgctgacggattcaagctgcttcatgacggctccgtatttgagttttatttctgccattaaaaccaactccagctttttttgattgattgtattttttctccgaccgtgtcaagggcttcttctcccagcgtcagcaggtgctctgcctctctcgcgatgcttctggcggcaaggagccctcctttttcaatttcaagctgtgtcatctttaagccgattctgtaaatataaccgtcgtatttgtctgtgacgattctgtatgcttctgtatgggcctgatcgcgccggtcatcaaattcttcagcaaaagtgccggtccaatgatgatccaggtgcggcctgaggatgtccctgatttcagacacgccctcttcctgcagagattctatctctcttttcgcttcttttaatttatcaatttggtgttcgatctcgcccagtttatggctgatggtgctgttaatatggcttaatgtgcttgaatggctcatctgttttcacctcgtcttacgcaaaaagtcgtacaaaaagcacagacttttccatactatatttccatatattatattttaaaatagacagaaagcagcttaaataggttaaatgacttattttcagcagccgagatgctcatcattaacgccaaaagactcacacaaacggcatatccattcattgatctcctctatgtatccatgataaattccctaaaaaaaagagacagtgaataaccgtctcctttgccttgtatcatgattctaataatgtcgttaactgcagtcccagttgtacaaaacgtttgagaaatcttttttcttcaaatcttccggtctgataaagaaattggcgattcccacatctccccacatcgaatcaatgtcatcatctgaatcaatttgcaagagcagaatcgtatggttttgatgggaataagaccgcggatcttcctgggtgaaggacgcatagccgccgattttatggccgaatgcgttcaccgtatattcgtcatacacctcatcgtcaaactgctcgaaatagtcgaaggcatccatcccggcatattgcctgaattgaaaatcagacgggagcgcccattcagcagacagctcaggggtgatcagcgcttcggattgaatcggaaaatcgtactcctcttcaacctgaacgaaagaaaaatcatccatgagctcctcttcccgatctgtcacgtgctcaaaatatttgacgcagaaacccgtttgcgcgcacccgtcgtcaaaattcaaaccgtatacgtcatcactgaccgatatgtaaaactgaagaatgccggtgtccggaaaatcaggtagtccgggcatatccgcaaaattgatttgggcgagaagcttcatcggcctgccgctttcatcttcagggtatggttcatgtttcggaaaataggggtctccggcaattttattgtcatacagtcccgtttcagcttttttgacgtgcagtttgataaagggccgtgctgacgtttccagcagaccgcgggatgattccatttgcttcggcaatttccatgtgttttccacgattaatatctccttcgtctctaatgattgtatgataaaaggccggcgcggaccgccggcctttcaagtgacagaatcagtctgaggcacgacggctcttcttccgattgagatatattccacgcccgcctgttccgcttcctcaagcgagtggcagtttctcccgtcgaaaataaccggggtttccatcagctctttgtacgcttcaagcgggaagtgtttaatttgttcccaatctgtcagaatcaggacggcatccgctcccctgacggcttcttctatggactcccgataggaaaccgcagacggaagcagcccggaagcccggaatgacgcgatcggatcgtacgctgtcatccgggcgtcaagagccgccagacgatccgcaatgacaatggacggggcatcccgcatatcatctgtattcggcttaaaagacagccctaataacgcgatggttttccccgtcacaccgcccagcctgttcagcactttatcaaccagcatggactgctggttattgttgactttaatgacggacttcagcaattcaaaatcatgctccacatgtcccgcgatctgcacgagggcgtttgtatccttcggaaaacaggaaccgccgtaaccgatgccggctcttaagaattgattgccgatccgtttatccaatcccattccgtgtgcgactgattccacatccgcaccgactttttcacatatatgagaaatttcattaataaaactgatttttgccgctaaaaatgcgtttgacgcatatttgatcatctcagcgcttctgatgtccgtatgatataccggaatcgcaagcggcgcgaaaacccggtcaagcgtttcccgcgtctgccggtcttcagccccgatcacgatgcggtcgccgtgaaaggtatcgtgaatcgccgaaccttcacggagaaattccggattcgaagcgattgaaatgttcacgtccgctctcagccgtgaatgaataacttcgctgattctgtcattcgttcctacgggaaccgtgctttttgtcacgacgatcgcatctttagaaatatgttcggcaatctgttcggcgacattttcaatataagtaaggtttgcgtgcccgtcttctttttgcggcgttccgaccgctataaaaataacgtccgcttccgcaagccctttttcgtagctcgtttcaaatgccagccgatgccggccgatatttcgtttcatcatatcttcaaggcccggttcaaagataggggacaatccctttctcatctgctcaaccttacgttcgtcaatatctatgcatgttacgtcatggccgatttctgaaagagacactcctgtcacaagaccgacgtagcctgttccgatcactgttattttcatcgtgttcccccaaccgtttagaaattgctgctgggcagcttaccgctattatcatatgatcccggcaccggcggaatgccgggagcctgaggtcatgataggaaaaaacggcgccggccgctgataatagcataagcataaaagaatcatcttgcaaaacagccgcttacgcttcatttaaacgggatggagacgacgattaaaaaagaccccagcgcttacggcgggccacaggcagcggaggttccttataaacggctttgttttcagcgagaagcgccgcattttccgtgagcatgtaaatcagctccgcccctgcttcttttttcagaacgctgatcgcctcctgataataaaaatttctcggtccgagattatgggcgtcagatgcgagaaagtggatcaaattcgcttccatcagctgcagcgaaaaggatttcgctttccgcccgaatgctccggcaatgcagccggccgtcacttgggcggccgcccctttcttcacaagactgtaaaggacggaaggattttcgcgaatttccctgttccgctccggatgggcgatgacggggacatatccgttcagctgcagttcataaaacagcctttcagcataggccgggacatgatccgccggaaattccgccagcacatactttgtattatggagcggggcaagcgagccgctttgaagacctgccagcagatctccgtctattctgatctcctggcctggcagaacagtcagcggaatgccttccttattcaaacgtttgtttaacaggctgaccgcttcgttgaccgtatgccgatccgtgtcatagcggtatttcacatgatgcggcgtcgcgatgatcgtatcaatcccctgtctgaccgcttctctcgccatcttcaggctttctgtatcatccgccgcgccgtcgtctatggaaggaaggatgtgacaatggatatctatcatatttcaatccctccttaaaaagaatggaccgcgcccattgtgacattattgtccgtaataggcgtagtccgaatgtttcgtttgtttcttcccgttcataacggccccaaggagcttgcacgggcagtaatcgagcgcttctttcgccttggccgctttttctttgtccgttttcccgcttgagatcaccataatggccccgtcagtgtagctgcctaatattttcgtatcggctacggccaaaacgggaggcgtatccaaaatcaccttatcataaactgcggctgcttctgacagaagatctttcatcgcacccgtcgataaaagctccgccggattgggcgggctcggcccgctcgttaaaatatccaagtttgcttcatcagccggcaggacggcattctgaaacggcatctgttttaacagcagcgacgttaatccggttccgttatccaatttgaaggtgaaatgaaccgtcggtttgcgcagatccgcatcaattaaaagcacttttttcccctgctgtgcaaatacgacggcaaggttggccgcggttgtcgattttccttcttccggaccggcggatgtgatcaaaagggacttcacctccgtatcaacggaagaaaattcaatgtttgtgcgaatcgtgcgatattgttctgagttgatggatttcggctcagacatcgcaatcacgcttcgttttccgggtttgtcttttttacgcgtcaacatgtccgcctcccgcttgtttggtttccgccatcctcaagcttttggcaacgctgtctttagtactgattgaagtaaccgttcccaggatcgggatgccgagcagcgcttccagctgttcttccgatttgatcgtattatccagatgttccagcaaaaaggcgagaccgattccgcccaaaagtccggcggcaaacgcaatcgcgatgttcagcttacggttaggctctgccggtgactggctgtccgacacttcggcctttgaaaggatgctgacattatccacgttcatgatggcggtgatcttgtcctgaaaaacggatgcaaccgcatttgccataacggccgcccgcttagcatccgtatcccgaacggcaatcgtcacgacttgtgaatcctgctcgctggataccgtgattttcgattccagctctttcgaagtcatggacagatgcagctgtttaatcacctcatcgaggatgaccgggcttttgatgatgacattatacgtgttgattaattggaggttggtttgaacgtcattgaattggacttctttttgattgtttttggattggctgaccaaaatttgagttgagttttcatagaccggcgtaagagcgaagaaactgatgagaccgcctgcggaagatgccgccgcggtaataataagtataaacagcagacgctttctcagtattgcgaatatttcctttatgcttgcagattctcccatataacctccatatcactttccgtgtattcccattccctccaatgatcttttccaattacgattatacagctttaaactgtcatttctaaccttttcaaatgacaaaattcgacaaaaatagacaatcacttcaatctgtattatatttgtaagcgctttaaatactggtgtcacaggaagattaaaaaatcccgcggccaggaggctgcgggattttatgttgcatatccatttttaatataagaaatcaaattctcaagcatttcttttgtggtcatctcagaggactgctcaccgatgtcgtgcgcatgcattaaaatcttcagaaactcctcttgatctaacttcgttttcttcatcattcgtttcctttcggcttccattaaattgaaaacaagattattatatgctgtcgggtgctgttttgcaatctctaatacatcattcgacacattcgggtttttatgtccttttttaggaaaaactttttccgggccatgtgttgcgatataatagaggaattggaatctttttattttgtgactcgttaggagcgataatcatgcttcaggatatgattgctaaagaagatgtgctcgcagcggctgaacagcttaaagaacttcttccttacaatgaagacaatgttcagctgatgaagaaagcactcattttatatcggcaggattccgtctatcgtatacaggttcaaaccccgacagagatttccgcatatgtgcaggatgttgtgcctgtaagggtcacgctgaacttatttttcatggtgaaaagcggctgcgcatgcccgtctgaggcgatctgccgccacgtgctcgccgtttttctttacgtatatgcccaattcgagcgggtcggtacctttaccgaacattggctggaaagagaaaagcttgaggaaagcagggagcttgtccgccggcagtttcaggaaaaagtgctgccgaatgaagagtcgctgtcaagctggctcgctttttttgattcggaattctcgctgtgggaggcgcggacgccggccggaagccagacgatgcagggcctttattacggctatctgtcagcgctcaaaaaacacgccccgaaaaaacccgagcttaaaagcttatatcagattcattcggcgcttgccgtctggcttcacatgttcactttgattgagtcaggcagattggatgccgaaaaagattattacagcattaatccatacgtggaacagctgatggatacgatttattcctccattgacagactgaaaacgtacgccttgtctttttcactcgatccttttttagaccggacgcccccggtgctccgcagactgcttgtgaaagaagagctttttcaatacgaacgcctccgggtattcggtgaaatgtggagcgcgcttttgaaccggccgaaatgggtcgcgcgtgaacaagagattctcgaacaggaaagcgggcgccgtttttcgccggaagtgcggttcggacggcttcatctggcctttttgcaaaaagatgatgaagcggtctttgaagatatgtcccgcttccctcctgaagcgctgccgtacacttttcaatggctcggtgaactcaccgcgaaaaaagactggaaacggctgaaaacatggtatggccggatcgaaccgcttgccgtgaactatacgaagcttgataagccgtttaaagaaatgcgcgacatcatcggagagctgtttgcgctgttggcggattatgcgcggcactcacgggatgatcagctgtttgaacggtttgcttccggctgccttccctatacctttaccgaatacagccagtacctgtacgaaaaacggcggtacgcggaatgggtggagattcacagcctcgtcggtttttccgtctgggaaattgaaaaggacatcctgaaggaaattgccgccagtgatccggaagcgctcatcccctcctatcaccgggcggcggccttttttatcgaccaaaaaaaccgcagcgcctataaagaggctgcgcgccatctgaaaaaactgcggacgctttataaaaaggcaaaaaaacagcaggtatgggagcgttatatcagccggctgagcgcaagctacaagaggctgcgcgcccttcaagaagaattgcagaaaggaaagttgattgatggcgagtcttaaggaaattttcattcatgtagaacaaatggaagattggacatttacgctgtcaagccatgatgagaaggagcagccgcttactctcagtcagatgaagactcatttgttccaatggcatgagtccaccttttacggaacgtttcttgaagacgtcagcttcatcggcactccggccgttctgctcagcccttggatgaccgtcgagctgcttggaaaaaactcgttcaattcattcagcaccgtgcagctgacaaaggaaacggaaccgttaatcgaagcggcttcgacgatatacgaatttattgccgacggcgattttcttccggattatgacgcatggcaaaatggcctcctgcgcttcaaagaccgcgagcttttgctggaaggctttacggcagactggttctcagccgcggtacaggactacattcagtacaatgatgacctgctggaaaaatggcggcggatcgaaacccgttcgccggccgttcatacgtttaaaggctcctttttggatgaagaggattttctggagggaatcggctggcatgacgatctgacgccgtttaccgtcggcctccgattaaacgagcctgatttcgacggtgacgactggaaaatcgagatgtttttacgtgagaaaaaaaccggctccatcacctttttcgacggactgaaagggctgaaaaaagcgtggcaggcatacagcggaaaaatcgcgcgtgaacaggaccgcttccgcagaacggttccctggctttcgtttgattcaggaacgacgctgatatctgaagaagaggcttggatcttcttatcggaagcgagtgagacgcttgtcgatatgggtgtggagattcttctcccatcatggtggcagattgtccgggacagcaatatgatgcttaaggcgaaagtgtcatcctccccgcggggcgagtccttcgtcggcatgaacgctctgcttgatttcaactggagattcgccacgaacgggattgagctgacagaggatgaattcaatgagcttgtcgcaaacaacagacgtctcgtcaacatccgcggccaatgggtgaaaattgatccgcaatttattaaacagatgaaaatactgatggaaaaagcggaatctgagggcctccacatgtccgacgtgctggcgcgcgaactgatggatcacggggaaaacggagccgaggacacggacatcattgactcatcggcatttgccgggatcaagatcgaattatcaaagcatctcagaagcctgatccgcaaactgacggatgccggggatctgccggagcatgaagtcagcgccgcgtttcagggccagctccgcccttatcagatgtacggcatgaactggcttctgtttttacgggaaaacggcttcggcgcctgtctcgcagatgacatgggacttggaaagacgattcagatgatcgcttattttctccatgtgaaggaaagcggccggcaaaaagcgcctgccttaatcattgcgccgacatcggtgctcggcaactggcagcgtgagctccagaccttcgcgccgcagctgaaggccgtgcttcattacggcccccgcaggccgaagggggaagcatttgtcccggcctatcaggacgcggatgtcgttcttacttcttacggcctctcgcacgccgatcaggaagagctttcttccgtgacatggagcaccgtctgccttgatgaagcgcaaaacattaaaaacgcgcatacgaagcagtcccgcgcaatcagaaagctgaaaggcgtccatcatatcgcgctgagcggaacaccgatggaaaaccgcctgacagagctttggtcgatctttgattttatgaacaaaggctatctcggcagtctgaccggctttcataaacgctatgtgctgccgattgaaaaagaccgtgacgaaaaaagaatcaaccagcttcagcagttaatccggccgtttttactgcgccggacaaaacgggatgaagaagtggcgcttaatcttcctgacaagctggaacaaaaagagtttatcccgctctcagccgaacaggcatccctttatgaacagcttgtcaaagatacatttgaacatatggcttctctgaccgggatgcagcggaaagcgctgattctgagcatgctcggccgcttgaagcaaatatgcgaccatcctgcgctctatttgaaggaagaacagacagagctgttaaacgggagatccgtcaaactggaaaagctgcttgacttaatggcggcgatccgcggacaaggggaaagctgcctcattttcacacaatacattcagatgggcaacatgatgaagcgcctcctggaaaaaacattcggagaaccggttcagtttttaaacggaagcctgtccaagcaggaacgcgattccctcgtcgaacggttccagaagaaagaatacccgacgctgattttgtcactgaaagcgggcggaaccggcctgaatctgacggctgccaatcatgtcattcactatgacaggtggtggaatccggcggtggaaaaccaggcgaccgaccgcgcctaccgaatcggccaggaacggttcgtccacgttcacaaactcattacgacgggaacgattgaagaaaaaattgatgccatgctcgaaacgaaacaaactttgaacgatcagattatccaaagtgaaaattggattaccgagctgtcatccgatgagcttgaagaattattcaccctcagcgcatcgacgcaatcacattaaacgcaaaaagaccggctctctcggaagagccggtcttttatgtcgtccttactgttacgccgcatttgccatgaatgcgtcacgccagtcatgaacagtatcgccatacctttcacagtaaattcctgatcatatacgcaacgccgttttgatcatttgtcaatgtaacggcatcagcgatctctttaatatcttctctcgcattccccatcgctatgccttttccggccgcctgaagcattgaatagtcatttaagctgtcaccgaccgcggcggtttcagccatcggaatgccgagcttttgcgccagccgtttgagcgcctgcccttttgaggcgtttcgagacgccacttcaaagttgtgatcggcagagctgacaagggtgagatctttctgaccgctgaatcggtcccagcccgctttcagcttccgctcatcaaacgaaaatccgagaatattataaaaatccagatgctcttctttctcaaagagctcacggtatgaatgaatgtaagcaaagccggactggctgtattgcactgaagccgcctgttccaaaacggaaagatcggtttccggattggcgcttttcacccggtccatttcgatatcgagcagctgcctgccggtttcaggcgtatagatggctttgtttgtaaacacctcataataatattgattctcttcaagccatgacaaaatcccccgggctcttgtttcttcaatcgcttcacaatggtacaggctgccgtcaggagcgtggatggcggctccgtttgcgctgataatccatgtttttatgccgagcggttcaaatatggagtgcacatcaaaatgcgcgcgtccagtggaaaccacgatttcaattcccgcttgccgggcttcccttaaagcccgcttgttttcatcacttacttgatgactgctgttcagcagtgtgccgtccagatctatggcaatcagtttcacatgtcctcatcctcttcttcagattcagttacaagcaattctacgccgtgccggtcgagcagatcgcaaaaatcctgatcaggcagccgatcggtaatcagcaggtcaacctcgtgcaggtctgcatactgataaaaactcgtacggccaagcttcgagtgatcgctcagcgcaatcacctgttcagcctgacggatcattttacgctttaccatgccgtcttcttcatgcggaatcgtcaggccgttttccgagatgccgacaacgccgatcagcaccttatcagcgtgataatcccccagtttttctacaacggaagccccgtataaaaaccggtgttccttctggagctttccgccgagcaggtgaatatcaattccctcttttgcggaaaggatatcggcctgattgatcgaatttgtaataacagtgcagccggtgacatttaaatgctccgcgcaggcctgaacggttgtcgatgtgtccaggatgatccggtctcctttatgaatcagggatgcggccagcttgccgattttgtttttctcttcagaaacggttttcagccggcccgaatagcccggaacttcctgattcactgacggcagaatcgcgccgccccgtgttctgataatggcccctcgctctttcagctttacaaggtcccttcttgcggtatctcttgaaatatgaagcagcgaacatatctgttcagcggtgatccgccggtgctgtttcaaatattccattatcgcaatcagtctttcttcttgatacacgtcctcattccctttttttcgtcacttatctgtaagtaattataagtttttatcccaatatattcaatgtttttaagtatttataagcgaaatcacttctttttaaccatttttcagctcccgcacaaaaaaaccagtctttcgactggcgaatgggaaggaggtattgcggggcccgctgaaaggcgggaaatcgaggaaaaaagcatgctattcagccagcggctctttccgtttttgatccataaaccgaacggtatcagccatgacctcggtcacataaacttttacgccgtctgtcttttcatagcttctcgtctggattctgccgcttacaccgaccattgaccctttttggcagtacaatgccgtgttttcagcgtttttcctccagatggtgcagttgacaaagtcggttccggtttcacccgacgcgcttttaaaattgcggtttaccgccaacgtaatatgagcgacgggaatgcccgctgatgtaaaacggagctccgggtctttcgtcagccggccgacaagcataacgtggttaaacaagccgtctcctcctctctttttcgaggctggcttcattgtagtataaaggcttatgaaagcaaaaagcggaaaaagcctttatccgtttgggctgcttttatgtttttgtttttctttctgataaaaaaaacttttgtttttgaccgcttatgtaatatgtatttttgagcagccgcgagaaaagtttcgttttgagccagtctttctcaaacatgcggacaaactttccgccgtcccatgcgaaccagtaaaaactcagctttttatcagtcaatgaaagctgaattttatactgttccatgcggtcttttgtttcatataaaaagacgacatttccccttctgttaagatgcacctcacaatcttcctttttgcataccaagtaggaatgatcgtcttttcgccttgaaccgtcttctatatagatttccttcaggcgcaattgattcataagcatctctccatgaccatattcttttacattataatgaaaaaatagaaatgattaaatgttgaccgcctacaaaaatgatgaagcatgtcttacagcattttcccgggaaaaatgatatgtgttataataaatgaacgaaaaacatggacaacaggggtgaaaataagagatgaaaacctttaaactggttgatctgaatgtggaacgtttagataaagacgatcagccgattgaacagtttccccttttagacggattgattatcaacaaagaggacggagaaaaccactggttaattgaagcactggtcccggccgaacacttttctttttttgacatgctgatgaaaagccagaaagaagcgaaggtgtttgtaacgattacgaaaaaaagcaaccgccccgcccagctgacgggaagcatcaaaaatattgtggagctggaaaagagtatacaagttttaatttacggtcaaatggtgtcaagaaaccaccccggatcagaaagcattctggagtcgctcgtgaaagaaggctactcgggcagccggctgattgaagcgtttaaacaaaaattataatcataaaaaaggccggacgttaatcatccagcctttttttgtgccttagtcattgtgaggagcccgctgtttcagcagatctctgatttcagtcagcagttctgtctgctgatctgtttcttctgcttcttcagcctcttcttctgcttcttttttacgtctcagcttgcctattgtacggatcacgataaagatagaaaatgaaataatgaagaagttcacaatcgtttgaatgaagcttccgtacttgatatgagcatcgccgaatgtcacggccagccctgaaaagtcaagaccgccaagaagcaggccgacaagcggcatgatgatgtcttcaacgagcgacgtcacaattttgccgaaagcgccgccgatgacgacaccgattgccagatccatgatattgccccgcatcgcaaagcttttaaattctgaccacattacattcacccctttctatacaaaatgggcttttttataagcccattcgtttgtttttattctccgagcgcaaatgttaattcagcttcacacacgagctcgccgtcaactttggcaacgcctttgccgcgtccgatcgtaccgcgcgcgcgggtaatatcaacctcaagctccagcttgtcacccggttttacctgctttttgaaacggcagttatcaatccccgcaaaaaatgcgagtctgccccggttttcttctttaatcagcatcgcaaccgctccgacctgcgccaaagcctctacgattaagacgcccggcataacagggtattcaggaaaatggccgttgaaaaaatcttcattcgccgtcacatttttatatcccgccgcccgttttccttcttcgacttccgtaattctgtctaccagaagaaacggatagcgatggggaataatttctttaatttgctgagtatcaagcattttcttgacatctccttcatcgacaatagtatgtatagaaggtatatgcgctaaccaatctgtacatttggaagtatattatgaatcaatttctttttcaaccgcgctgtaaactgtaaccagctggcaatgagcctcgtccattaatgtgttatgataaataaagatttttaccctatgcaaagaggttggaagatgattgctaagtttactgaaaaacgtacgctggtgatgctgaatgagtggtatgacgccatgggaaaacgccaattcgatctagcccgttcccttcacgaacaaatcaatcagcatctccccaaattacaaaagaatgcaaagctcaaactcagatatcagctgtttttcgcacggtttcagctgctgtttgagaaaaaagacggtctgactaaattgttctgcgagctgaagcggcgcaaagatgagatggaccatgaattaacttattatttctattttttcaaagggttattccatatggtgaatggcgctccgaaccgtgctgtctgccgctttaaagaagctgaacagtacctgccggccattcaggaccgtttcgaagccgctgaattttattataaaacagcgggtgcatattacatgatgaagtcgcctgcgctctccattcaatatgtcaataaagcgctggaaatctatcaaggtgaattcggttacatcaaaaaaacgctcagctgccgtctgcttctcgccgtgaattacatagacgaggcacgctatgaagacgcagaacagctctttaatgaatccataaagataacggaccggatcaatgacaataacctgctgtgccacgcctattataattttggttttttaaagaccgcccagaaaaaagataaagaggccctccctttttacaaaaaggtattgggcaatcagcgtttcgagaaagagtctcccgtttcctacctgcattgtgtatacgaagcggtcagagcactttttaaaaccggatatgccgccgaaggacaaaccgtgctgcagaaaggtttatacatatctgaaaaagtgcagaacaagataatgaaattgaagctgaccgcgctcaacatactgtacaccgctcaggaggacccgtacgaccgattgcagaaactcgtgctggagctgcagaaaattgaagcgtgggtggatttggaagtgctgcttcaggatattactgattactacaaaaaaaagggcgattttgagaaagccgcattttttatcatgcgcggctgatcaaaacgccccttcttttatctgactgagttgattaagcccagcatttggtctcccaatgtaatcgtgcggctgttcagctgataggaacgctgagacacgattaggtcggtcatttcttttgacatatcgacatttgaactttcaagcgcgccctgctccatgccgattgcctgccggtttgcgccggtaagctcttcaatcgctgatgcccccgctccgtttacggaaaacagattatccccttccgcatgaagggcctgaggattattgacattgacgatgccgagattaaacgtctgcgaacgggttcctgccgggtctgaagcagtcagcgttccggttttgctgattttcagctgattcagcgaactgtcaatttgtatgggctggccgttctcatcgagaatgggattgcctcccgctgtcaacagctgaagcacccggtcatttccgccggccggcttgagggaaagtgagccgtcccttgtatacacccgccgtccgtccgcttctgcctgaagatattgataaggtgaggtgaacgcgatatcaaggtcacggtcggtttttttgatgcctccctgccctgagtccagctgcggagtcatgaccgttccggcgccgagacgcaggccgggcggcgttttccgcatgttcggcgaattttcctttttgtcatctatatggtcatactgctgtctgatcagctcggaaaagcgggagtccctcgctttatagcctgtcgtatcactgtttgaaaggttgctgctgactgtatccatctgctgctgaagctgatttaaggctgttgaagccgtcagcattgatctgagcatcataattgaacgtcccccattttgttacactttgccgatttcatttgcggctttatccatgcttttatcgtaagcctgaatgactttctgattggcttcaaatgatctgtatgcttccgtcatttctgtatacgtgctcgtcacgtccacattcgaaagctccgagacgccttgctttaatgaatacgagacctggggattcgccgccgcgctcggcagttcagtgccgtcggccgtgctgtataggtcattgccgtcccgtttcagattgcgcacgtcttcttccatcctgatgtcaatctgccccgccggccggccgtttgtcgtgaccgttccgttttctgatacggtgaatttttcattgtcgactgtaatcggctgtccgtttgttgataaaacaaggtttccgtttatggtaagctgattgttttcatttaatgagaaagtgctgctttttgaatagcggacgccgcccgcagtctgcacgggataaaacagctcggcgttttcattcgtttcggcattcttgggaacctgattctccataagcgcgatatccgtcggctgatcggtcgttttcaggcttccctgcgtaaacaacggtttcagctcctgcatgtatacgcctgtgttgacggaaccgattttcgtttttttatcgccttctattcggctcagaagcatctcgggaaaggcgcggattgaaccttgatcctctttgtatcctgacgtattcgcgtttgcgatgttatttgacagcatttccgttcttctctgctgtgtaatcattgcggacgttgcggtatataatccttttaacaagtcttccacctctgaaatagcattatttccagttgcctcaccggaacatttgttctataatgaaaatcagcattttttcttattatcggatttacattcccgttcgtgaagggtttgacagaaaaaaaccccattctttttcagaatgaggttttatcatcagctcagtttgcgtttcggaagcttgtccatgttatccagcatgacgccggttccgaccgcaacacaatccatcgggttctcagcgacaagaacaggcaccctcagctcttcggcaagaagctggtcaagcccgtttaacagcgctcccccgccggtaatgataacgccgcggtcgatgatgtcagcggacaattcaggcggtgttctttcaagaacctgcttggcggcctgcacaatgacggcaactgattcacgaagggcttcttccacttctttgctgtttactgtaatcgttctcggcaggccggaaaccatgtcacggccgcggatggtgatttcttcatgacgtgcgtctgggaaaaccgttgcgaccttcaccttaatatcttcagcggtacgttcaccgatcagcagcttatactcgcgtttgatataatttaagatttccatgtcaaacttgtccccagccatcttaatagaagaggaggtgacaatatcgcccatagaaataactgcgatatctgtcgtaccgcctccgatgtcaacaaccatgttaccgctcggctggaagatttccatacccgcgccgatagcggcaactttcggttcttcttcaaggtacacatgctttccgccgcttttttcagctgcttctttaatcgctttctgctcaacggatgtaatattcgtcgggcagcagatcagcatacgcggttttgagaaaagtccttttacattcagcttattaatgaaatgtttcagcatagcttcagttacttcgaagtctgcgattacgccgtctttcagcggacggatcgcaacaatattcccaggtgtacgtccaaccattcgtctggcttcttcaccgacagccagcactttgccgctgtttttatcaagtgccacaacggaaggctcattcagaacaattccttttccttttacatggatcagtacatttgcagtaccgaggtcaattccaatatcccttgcaaacatctatttatatcctccttgatatctgtttcacagtaaaatatccacattgtgccctaattatatatattatcataatttatcaaaaaaaagctgctgatcgatataagttcttgacaaaattttgcggatattcgcgaaaccgcccggaggagaaaaaagggcccggcagacgtcaggcgctacggctgctgaacgggctccccttcaagaatttcatccttcttgtactttaatttcgtcgcctcgccccccttaaatgtctgatggatttatgataatcgagtatttcttttacttcattcgccaagtcaggattgatttcaggcaggcgttctgtcagatctttgtgtacggtacttttggaaacaccaaactctttcgcaatgacacgaacggtttttttcgtctccacgatatacttaccaatcttgattgttcgctctttgatgtaatcgtgcacaccactcgacctccccagttggatgtgagaagtgtgaaatgagatccgtattctgtaacagattcactgatgatgcagcttcttcgttgtccgattatataagaaggttttagaaatatgcccacgatccctcacctcaaacactctctttgataggtttgtaacagtgtattagcaatgaattgggaatatgctaaaaactcaataaggacaaggggcgggtcataattttctgctttttgaacggggggtttacatccgcgcgatcctgctgtagaatgaaacagcacaattagttacttaggtaagttttttgaaaaggagaacggaaatgatccacgtcaacagacgcctcattcatcaaatcaatcaatgcgcccgcctgattacgaagaaagccaatgaacggctggaaccattcggcctgtactcctctcaatggtcaatcctatattgcttaaaaacgatcggaccgatgacccaaaaagaaatctggtcttatctgaacgtagaggcgccgaccgttaccagaacgatcaaacgccttgaagaaaacggctggattcagcgggaacagggagaagacaagcgggaaaagctcgtcgtcctgacgaaggaagctgaattgaaatacaacagcatcaatcaagagatgctgaagttcgaggaagacatgcttgcggatttccaagatggagataaggaagctttttctgagtttctgaatgtgtttttaacgaaataataaagaaagggaagtgctgtacttttgagtaaatctgactcgatctggaccaaagattttattatggtcgtactcgtaaatttatttgtctttgtgttcttttatacatttttggccgtgctgcctatctatatgattcaggagcttggcggcagtgaatcgcaaggagggcttttgatcagcctgttcctgttatctgctattatcacccgtcctttttcaggggcgattattgaacggttcggtaagaaaagaatgacgattgtatctctggcgctgttcgccctgtcttcttatctgtatttgccgatacacaatttctatctgctgctcggactgcgttttttccaaggcatctggttcagcattttaacgacggtcacaggcgcaattgccgctgaccttattcccgccaagcggcgcggcgaggggctcggttattttgcgatgtctatgaaccttgccatggcgatcggtccgtttctcggactgagccttgtgaaagtcatatcgttcccggtgttctttacgctttttgctgtatttgtttctttaggcttgctgattgcttttatgattcgtgtgccggatcaaaacaacagcggaacgactgtgttccgtttttctttctccgacatgtttgaaaaaggcgcgcttaaaatcgcgattgtcgggttgtccatttctttctgttattcaagtgtgacttcatatttatccgtttatgcaaagacgatccacctgttggatgtcagcggctatttcttcgtctgtttcgccgtgacgatgatggccgcccgtcctttcacaggaaagctgtttgacagagtggggccgggaatcgtcatctatccgtcgattatcgtgttctccgcggggctttgcatgctggcgatgacaaacagcgccctcatgcttctcttgtccggtgccgtaatcggtctcggatacggctctatcgtaccgtgtatgcagacgctggcgattcagaattcgcccggacaccgttcaggctttgcgacggcgaccttcttcactttctttgacagcgggattgccggcgggtcatatgtattcggcctcttcgtcgcttcggccggattccattcgatttatctggcagcggggctgttcgtcctgattgctttgctcctgtatggctggagccagaaaaaaagaacgccgcttgaagcggacggaaacgtttcaatcgcagactgatatgacaaaaagccgggggcagcccccggctttttttattcggccgctctttcccgcacgattcgtccctccgcttttgcataaggaggatgaatgtacataagcgccgtataaccgagacatgacaaaatgacacccgcaaaccaggagatatcatagatgccggcgaacgccgggacgtacatcccgattaaagaaataaacgcgccgagaaacgtcgcggcaaaggcccggtaattatagcctttgtaataagtgtactgtccggtttctgaataaaggtcttcaactgagagctgcctttttctgatgataaaataatcagccatcatcaccccggccaccggtccgagcatcccgccgatgagtccgagaaacgcatatacattcgtggcgctctccatcagcttccacggtattgtgaacagagccaaaacggcggtcaaataccctccccttctgaatgtaatatacttcggcaggacattcgccaagtcataggccggtgacacgatgtttgccgccacgttaaccgagacggcggcgatgcaaagtgtgatgaccgaaagagcgataacgaaaggattatcaaaccgggccaaaatctccaccacatcccagatcggttctccgaatgctacctgtgatccggatgtcaccgtgatgcttgcaaacgcaaacagcgcaaacgttcccggcagcccgtaaaactggccgcgaatctgttctttttgcgacgcggcgaaccgggtgaagtcagggatattcagaatcagcgtcgcccatattccgataatgcccgtcactccggcggcaaacggccaaaacgtttcagaaaatgtatggaactttcccggctgtgagtaaatcggaccgagcccgccggcaatatctatcgcccaccagaccatgccgccgaagacgagataaacaagcgggcccgcccacacttcaaattttttgatcgattccatgccgtgccgcagcacaagcagatgaatgccccaaaagaaaatgaacgacagaaagcccggcagatgaagcccgaatatattccaatctccgccgagactcccccagcccggccatatgttcaaaagcagaatgtgtaaggcagtgctcccggcaaatgtttgaattccgagccacatgatggctgtaaatgccctgagaagcgccggaatgttagctccgtatattccgtaagaagccctgataatgaccggaaaaggcaggccgtatttcgttccggcatggccgttcaaggccaaagcggcgaacaaaatcagtgacgccgtcacgataatggcgagcacctgccacggagaaaggccgatcgcaatgagcccgcccacagtcgcgtaggtcgggatattatgaatacaacccatccagatggatgcaaaattcaccgccttccatgtccgttcgccgtcttctaaaggcagtaaatctttgttgcttagccgatcactcgttatttttgtcattttctccctcctgcatgtacgttttccttacatcacatgtgaaaaaatataactgaaaattccgcaaataacattggtcgctgtcgacaataatcgttttgatttttgagcacattacacaaaaaaagagacggggagagcccgtctcttttttttgcgcctgttaagaggcttttttgaggagaaccgaaaaccggaacgccatcaaaaggcttacggcgccgacaacgataagaatcgtgccgagcatatgaaaatggccggcggtaatttcttttccgaaaagaatgcccaaaatgacagaagacaaaatcgaaccgagatacctgcaggtctgaaacaggccggacgttgttccgaccatgtcggcggggctcgttttcagcatggccgcctgaaacgtgacatttccgaaaccgtagccgacacccagcacggacaggatcagcccttttcctatcatgggcgcctgaaggaagaaaaacgttaacagcaccgctccgatcgcggtcaggcaggttccggcaacaatcggctgaagaagccctttcttatctatccattttccggtcaaaggcgacaccagaatactcatgcccgacataaacagcataatcaatccgcttgtctgaacggacaaatgcatttcatcctgaaaatagctcggaagcccgaaaaagatgcagtaaaagaatatattcagcaaaataaattgaatatacaccgacgatagtttccgatgcgttttaaacagcctgacatcaataaacggcttctctgttttcagctcacgccagataaacagcccgacaaataaaagcccgaatacgccttctgtatagtgaggcttcgtactgaaggacaataaaaacgacaggagaaggataatcgctccggcaaacaggagtatcccgattgtatcaagctggcggagcacgcctttcaagccgccgatctcgcgtttttcatctttcggaaacatatacattccgagaaaaaaactgaggatgataaacggcagattgacgaaaaagatcgccggccaccctccccaaacgatcagaaaaccgccgagagtcggaccgagcgccgtcatggctgatgcaaagattgacaggacggccagcgccgaagcctgcttctcctgtatatttgaacggatcaatccgacgccggacggatatatcgcgctgcttccgatcgattgaaaaagccgcatgatcagcaatgtcataaaagtcggcgcaaacggcgcgccgaccgccgagacggcaacaagcagaagcccgatcaaaaacagcttcttcctgccgagcatatcaccgagcttcccggtaacaggctgcgccaccgcgctggcaagataaaaggacgatatcagccaggacaccgttgtaaacgacaggtgaaattcatgctgaatactgtgaagcgcaagagaaatcatcgacgagttcaatgggttcagcatcgtccccgaagccacggccgtcaagaacaggacgcggctttttttggagattgtcattttgtctgtgcgataaattcttccgtcgtccggcttctgccgattttcgggaagataaatttgagtgtcgcttcgtgctgttcatcgctgaatgtcgccatcgcgtcagttacgaaaacttgctgatacccgagctgaaaagcttcccgcgccgtgctttccacaccgatgtttgtcgcaatcccgcataacacaatcgtgtcgattccccgtcttctgagctgaaggtccaggtccgtgccgaaaaacgcgccccactgccgttttgttaccgtataatcgttttctttcactccgatttcaggcacaaattcagcccaatccgccggcggagccgaatggcccgccgcctcttcatccgtcagcggcttcagcgcatccgctccgtcatgaaaatctacgttcacaaagctgataaatccgcctttttcccggaacacatcaattaattttttcgcgttcggcacaacggtaccgcttttatccatcggcacaatgcctttttgtaaatcaataaggaccaaagccgttttttcaaattgcagattcaatgatgttgtcataataattcctcctgatgcagttagtgtttctcaccccgtttattttactctttcccggacaggatttcttccgccatgctccagcgctctttttatggatataaagtcgcatgacacccctttgaaaaagcgacattatgaacgcaaaaaaacatgtcagataaccttacacgaaaatgttttatcgttcttttttctctataataatgaattaatcacgattacattttgaatgagacggaggaatacaacatgcagatgggcgatacagtatttatgttcttttgcgctttactcgtgtggctgatgacccccgggctggctttgttttacggcggaatggtaaaaagcaaaaacgtgctcagcacggcgatgcacagtttttcttccctcgccatcgtatccgtcgtttgggttttgtacggatattcacttgcttttgcccccgggaatacatggcttggcgggattgaatgggccggactgaagggggtcggctttgaacccggaagttatagtgatacgatcccgcattcattattcatgatgttccaaatgacgtttgccgtactgacgacggccattatttccggagcatttgctgaacgcatgagattcagtgcttttcttgtattttcctttttgtgggcttccctcgtatatacgcccgttgcgcactgggtatggggcggcggctggatcggccaaatgggcgctcttgacttcgcaggcggaaacgtcgtccacatttcttccggggtcgccgggctcgtgctggcgattgtgctcgggaaacgcaaggacggcacggcggcttcgcctcacaacttaatttacacgttcttgggcggggcgctcatttggttcggatggttcggcttcaatgtcggcagcgccctcacgcttgacagtatcgcgatgtttgccctcattaacacaaacaccgcggctgcggccggaattatcggctggattttaatcgaatggatgctgaacaaaaaaccgaccatgctgggtgctgtatcaggcgctattgccgggcttgtcgccattacgccggctgccgggttcgttacgccgttctcttccatcgtaatcggtttcatcggcgggcttgtctgcttctggggcgtgtattggctcaaaaagactttcggatacgatgatgcgcttgacgctttcggcctgcatggaatcggcgggacatggggcggcatcgcgaccggtttattcgccaccacttccgtcaatgacggcggggcaaacggactgttttacggcgatccgggactgctctggaagcagattgcggccattgcggcaacctatgtatttgtatttattgtcactttcgttatcattaaaattgtaggtctgttcattcccctccgcgccagcgaagaagaagagtcacttgggcttgatttaacgatgcacggggaaaaagcatatcaggacttataaagtgaggagtggcttagatgagcggtcaaatgttcaaggtagaaatcgttacgcgtccggctaagtttgaaacattgaaacaggaactcggtaaaatcggagtcacatcgctgaccttctccaacgtacacggctgcggccttcaaaaagctcacaccgaactgtaccgcggagtcaaaattgaaagcaatgtatatgaacggctgaaagtggaaatcgttgtcagcaaggtcccgttgatcaagtggtggaaacggcgaaaaaagtgctgaaaacgggagagcccggcgacggcaaaatattcgtctatgaaatcggaaacacgattaatatccgcaccggagaagaaggaccaggagctttataaacagacagaacgcccggagacagcatgtcccgggcgtttttttcgggcttcattaaaaagaagaagcctttttttcatgcggggcaggacgcttatgccgtacggtttgttttttcgcatatgtactgatattgaccagtatgccgcacaaaaacagcgtcataatcaatgaagaaccgccatagctgataaacggaagcggcacacccgtaaccgggaggagtccgctcatcgctcccaaattcaagacaacctgaaacattaattgaaacgtaattccgatggcaagaagcttcccgaacgggtcatcagcccgcacggccgtttttacgccgagaagcattaacgcaaaatataatcccaaaacgatcagaacaccgaatatccccagctcttcactgatcacggccataatgaaatcggtatgcgcctcaggcagatagttcattttttcaacactgtttccaagccctcttccgaaaaacccgcctccggaaatagcaaaataggattgaatcagctgatagccgtccccgttcgcgtcaccaaacggattggtaaaggaaacgaggcgcttcacacgataggatgcagaaaatgcgagataaacaacccccgacaccgccgtcgcgccgagcacgaaaagatggcgctttttcaagccggcacataataaaatcgacccgcacgccgccaggattaaggaagccgtccctaaatcaggctccgccaaagtgagcagaaaagcggtccccaaaattactaaaggcggcagaacccctttcacaaattgatgaatgtacggctgctttttcgtataaaccgaagcgaaatacaaaatcatggcgatcttcgccaattcagacggctgtacgacaagcgggcccgctcccagccacctgcgggaaaaattccgctccagcccgattcccggtatcaatacgagcagcagcaataccagcgaaccgaccacaaacagcggtacaagccgcgcataccgcttatacggcagacaggcggcaaatagaaataagcataatccgatcagtaaagaggcactttgtttatggaagaaataggatggatctccgtaccgctgagaccccatcacatcactggcgctgtacaccattaacaagccgaatccgcaaagcagcataatgacaaacacaagcggcagatcggcgtttttcaaacgtttcagcaacggacaaaactccttcggctattcttttcccgcatacttgacgcacagtaatacagtcacgtttcattctgtttacttttttatgattatttttaataccaattgtgtctcatagaaaaaagcattacactgttcatataaaataaagataaaaggtgatatttgtgaattacgaactatttaaagcgatcaatggtttgtcgcaccatagtgccattctcgactctatcatggtttttataacggaatacgccatttacgcctacgcccttttcctgcttgccatgtggctgttcggaagcacaaaaggcagacaaaacgccctgtacgcgggcttcacgggtgttgcggcgcttatcatcaactacctcatcacgaaagtctatgtcgagccgcgcccctttgtcgagcatacggttcatacgctgatccctcatgccgcggatgcttcattcccgagtgaccatacgacaggcgctttggcgatttcaattgcgattctgttccgcaacaaaaaactcggctggccgcttgtgattttcggccttttgaccggcttctcaagaatttgggtcggccatcattatccgatcgatgtgctcggaagcattatcgtttccctcattgtcggattcctgctgttcagattttcaaatgtgcttcgtccgattgtcgatctgatcgtgcgaatctatgaaagtatcgttcataaaagcaaatcgacaaaccataatatataaaaaaagccggcgtctgtcacagactgccggtttttgtatgtttggctgtatgctttttcctttgtaaagcccagaatgcggcaatgccgagactgtcaatcagcacatcgcggaggcatccgtttctgccgaaaaagagctggacgatttctgtcaggaaagcggcggccaatgcatacagcaccgccctcttcatgcgcctgcgctccctgaaaaacaaataggcgagcacaaaaaatgaaaacgcgtgcccgagcttttgaatcgccgcttccggtatggcgagctccgccatatcgaacacaaagaaaccggacacatccggatgggacgtgaaacggaaggacaccgtctgcgacacaatcatatcgtgaaagctttcagtcaaagcagaaacgaaaacaaagacgagccacccggccgccagacatttattcattcagcatctccttcgttttctattagtataaaggcacatgcagcaatatgaaaagcgcctatcagagctgatagacgctttgggatcaagattacttgcccgaatctttcattgagccgtcatctttaccatctgtcttgtcttttgtgccgtcttctttgtcacctggtttttcttcggtttcttttttaggcgtcacatcttttttctcggaagactgctgaattgacccttccgtttcttctgtcacagcgtttttctcttcagccgccgctttttcaatagatgttaccggcttgtccataaaattgagcgggttcatcgctacgccgtccttgcggatttcaaagtgcacgtgatttccgctttcttcactgtaaagattttttccggatttaccgatgacctggttctgctttactttgtcgccctggtccacgctgacttcagataaagactgatagacagtagacaggccgtctgagtgttcaatttcaaccacataccccagtaccgggtctttagcagctttaacaaccgtaccgctcagagaagcagaaacatcaaatgattttccgtctttctcagctaagtcaattcctttactgaggctgtacgtgttattatagttaacaagtgctgcttctttctctttttttgcggcatcagattcgtaaaactttttcacaacagaaacattttcagaatgagcagccggcattgcgacgttttccattgacttgcctacttcgacggcatcgtctttgccgctgtcatacgcggagtttccgccgttgttcgtcagattgtccttcacatcattcgaaacggattgataccaaaggacagctgttaaaatgacggccgcactgactaagtagattgcagggaatatccagcgtttgcgaaaaaaccgctgaagttttttgacttgagaagttttcttttcttcctctctcatttgttcatcacctcagcaacattctgaacacttttctgaaaatatatacacatccataaaaaacttttttagaagtagtatgtgcagattgcacttaattatgtaatgaaatgtgaagggagatcccggaatatgaatttaaccctgcgcaaagccgtattggaggatttagatgcggtggtggccatatacaactcgacgattgcctcacgaatggtaacggctgatacggaagaagtgacgcccgcagaccagatggattggtttttgcggcacacggaccggcgcccgctgatggtcgcggaagatgaaaccggcaaagtggcggcctggatcagctttgaaacgttttacggccgtccggcctatgacaaaacggcggagatcagcatctatctgcatcaggattgccgcggcaaaggagcaggaagctttctgctgaaagaagccctggcactcgctccggcaatcggcatccgcagcctgatggcttttatcttcggacataatgtgccgagcattaagctgtttgaaaaattcggttttaccgaatggggcgtattcccgggtatcgccgaaatggacggaaaacgatatgacttgaacattttagggagagaactgtcatgatcaccatcgataaagacaaagacgaaaaccagccgctcaataaaaaagcccgttcccttgccgacatcgccaaatggggaaagatcaccgccgtgtttctgatcatcacaggttctctttccgctctgtcagccattgtgacgctgctcggagccattccgggtgttctgctcatcatttccggcgtcatgctgatgcgctcggcaaaagcggctgccgcccttcaggaagggctagaagaaaacgcggaagaaaatatgcttgcacattatgcgtcatttatcaaaatgcagtttttttacgcggcatccagtgtggtactgggcattctcgcttttattttagtcgtcatcttcgctgtcatcggaattatggcttattacagcactgatacgtatgacacgcctgattcatattactatgagaacgatcctgtgtttgaatgacaaaaagagctgatcgcgcgtcagctcttttttaatacagcatttcttttttccggtcttcttccgttaaaaattcaataaagctcttcatcgcagacggctcctcggcaatcagccgggtgtaggcgcttttccgttcctcggacagaatatcgctttttctgattctgttcagcatataaagccggatcgttttttgcacctgtttccgctgatagccggcttccttaaaaaacgcaagacccagagccgcaaggagggcaaaaatgccggccgatacgagagctcctctcccggaaggggcctgaatcaaaagcgatgccagatgaaacagactaaaagcggcgagcgggaaagcaagaaaacggtaaatgatgctttttttcatcagcggcgcgatggcgatttgtattttctgaatttctttttttatgaatcccggcaattgttccgcatgctccagcttcatgccctctcccctttgctgtcatttttgtcttctttttcatatatgcatattttaccgcacccggaactttctttgaaagaaaactgcattcatctttgattccggctctttattctttcaaaatgtcaatgttataatttgaaatgggaatcagattgctgcacttgtcggaatactaatgggcacagtcttgataaatatgatatagcggggttgcaaagtgagcatttcatttattttattcggattttttttcgttttaaatatacttttggccgtcatcatgattttcaaagaaagacgcgatgccagcgcttcatgggcttggctcttggttcttttttttattcccattttagggtttattttatacctgttattcggccataacctgagacgcaagcacctgtttcaatgggaagaccgtaaaaaaatcggaatagaaaagctgctgaagtttcagctgaaagatctgaagtcgaggcaattccaatttaacaacagggcgactgtggataataaagacctcatctatatgcttgtcatgaacaaccacgcagtctttacagaggataattcggtggagattttaacggacgggcgcgataagttcaaacgcttaatgaaggacatttccaacgcaaaagatcacattcaccttcaatactatatttataaaggtgatgaactgggaaaaaaattgcgcgatgccttagtgaaaaaagcacgggaaggcgtaaaggtcagagtgttatatgatgaactcggttcaagatcactcagaaaaaaattcttcaaaccgctgcgggacgccggcggccatgtggaagtcttttttccttccaggcttcgtccgattaatttgcggctcaattatcggaatcaccgcaagctcgtcatcattgacggcgaaaccggctatgtcggcggctttaacgtcggagatgaatatctcggcctgaatccgaaattcggctactggcgcgatacgcacctcagacttcaaggcacggcggtacacgccattcagacacggtttattctcgattggaaccaagcttcccatcaccatacgctcacttacgttccgaatcattttccggaatgcgagccgaagggcaatgtcgggatgcagattgtcacgagcggaccggattcagaatgggaacaaattaaaaacggctatatcaagatgatctcaacggccaaacggtcgatcctgattcagacgccttactttattcctgactcaagtcttttggatgccctcaggatcgcctgtctgtcaggcattgacgtcaaaatcatgattccgaacaagccggatcacgctttcgtttactgggcgactttatcttacatcggcgatcttttgaaagccggagcctcagtctacatttacgataacggctttattcatgcaaaaacgattgtcgtcgatgatgagacggcttcagtcggtacggcgaatatcgacgtcagaagcttcagacttaattttgaagtcaacgcctttatttatgacgtcaccatcgcgaaaaaactcatttcctcatttaaagaagatctgctcgtctccagaaaatatacgtatgaagaatatcaggagcgttcgctgcggatccgcattaaagaatcgatttcaaggcttctgtcgccgattttgtaattcccgggatgtttctcgggaattttctgatataaaaacggacacagcttgaaaaaacacattttatattcaaaagaatgaccgaatagtgtataaatgaaaagtgagtatttttttgtaaaggagtgccatggtttgaaacctgaatcagtgaatcgttcgcttatttctatttcgaaatggggaaaagcgacaggtattttgtttattattataggcgcgtttgcggcgctttcgggcgcgtttttctttttaatcggagccattcccggcgttctgcagatcattgccggcatttttctgatgcgctcggcaaatgaagcgggacagatggcggcgcagttcaatgaactgacagaggaacatatgctggagaattatgcaaagttcgtgaaaatgcaggggatctatctgatcgtgacggtcggcttgtccgttctcggtatcgttcttttcattgtcctcatgacgctcggcatcgtggacgacgcgtttaataatattgatgccaatacatattaaaaaggaaaatcccggcgcatccgcccgggattttttcttattccgcttctccgacaacggtaaagtttttctgcttcggatttgccaatacggcgaacagcattgacgctgtatgcagatattctttcggcaaaaaagttttttcaaataaaacgtttcctcagagttttaactgaaatcactgagttctgcgaaataaggctatggcggtacaagaccactcatcatacaattttttgggtctttgtaattaaattacaattgttcttaatattcacccatgtattcatgctattatattgaaaggaacgatcaaaagcgttggcgttcgttaaatatttacgagtgctgcctcatgtcaaagtcagaaaaaatagtataggaggtaacatatgtttaagtttaaaaagaaattcttagtgggattaacggcagctttcatgagtatcagcatgttttcggcaaccgcctctgcagctggcacagattactggcaaaattggactgacggggcggaacagtaaacgcagtcaatggctctggcggaaattacagtgttaattggtctaataccgggaatttcgttgttggtaaaggctggactacaggctcgccatttagaacaataaactataatgccggtgtttgggcgccgaacggcaatggatatttgactttatatggctggacgagatcgcccctcatcgaatattatgtggtggattcatggggtacttacagacctaccggaacgtataaaggtaccgtaaagagtgatggaggtacatatgacatatatacaacgacacgttataacgcaccttccattgatggcgataacactacttttacgcagtactggagtgtccgccagtcgaagagaccgaccggaagcaacgctgcaatcactttcagcaatcatgttaacgcatggaagagccatggaatgaatctgggcagtaattgggcttatcaagtcttagcgacagaaggatataaaagcagcggaagttctaatgtaacagtgtggtaacagctcatctctaatgaggggcagctaacgggctgctgatcgttccttgagaaattttataatgattgtgaagaggcgaacggttttggcattaccggaggcaggatattctccatcagtttttttagcgcgtattaaaataagagttccgtctttttttggtaacccgcttacaacagacaccttcacataagccttaagcaaaataaaaatatcccggttaccacctcctttagtttcggaggttttcttcattaaacagatcgcaatcccgcatccaggcttgtctgaatatggagccaaaaccgtgatttcctcattacccattgtaaccatttccgttacacgtctagcggcatgaacccatctctttttaacaaaagagatgattcattacatcataaagggacttgctcgcaagttcattctccattgcccgctgtacgcttccgaacgtctcatcgagcgcgcgctgaatatttttgccgaccggacagtcgggattcggattgtcgtgaaccgcaaaaagctcttccttattctgcaccgccctgtaaacctctaagagggtgatctccgacggatcttttttcaggctggctcccggaacacccgcccgggatgtcagaatacccgcttttttcagctggctgatcgttctccgcactacgacgggattggtgtttacgctgcccgcaatcatgtccgatgacgcccgttcatccgttgagatcagcgataaaatgtgaatggccacagcaagacggctgttaatcatgtttttcaccaccattgtaaccaaaatagttacatttcatttgtttgtcaactactaatatacactaaaacgggcggcaggatgaaatcaagttggcaatagagggtaaacaggccggcgggaaaccggccggagagggattaaaataagaaataacgctgtcctagcggaacatagctgacgggctggcatgccagctcttctccgtcggcgaacacctgataggttttcggatcgacatgtatattcggcatcgcgtcattcagcttcatgtcgagcttactcagcttacggatattccgtacgggagaaatcattttttcaaggccgagcttttccggcacaccgtttgcgataccggcctgggacataaatgtaatagaggtattgcggtttgctttaccgtatgatgcgtacatctgccgcataaacacgggctcaggcgtcggaatggaagcattcggatctcccatctgggcgcgggcaatcatgccgcctttgagcacaagttcaggtttgacgccgaagaaaaccgggtcccatagtacgaggtcggcgagctttcctttttcaacggaaccgacttcatggctcagaccgtgagtgacagccgggttgatcgtgtatttggcgatatagcgtttggcgcgcacattgtcattgctgttttctcccgatagagcgccgcgctgttttttcattttatcggccacctgccatgtccggataatcacttctcccaccctgcccatcgcctgcgagtcagatgacgtcatgctgatcgcgccgatatcgtgcagaatatcctccgccgcaatggtggccgctctgatgcgtgaatgactgaacgccacgtcttcaggcacttttgaatctaaatgatggcagaccatcatcatatcaagatgctcgtccatcgtgttgacggtatatggaatcgtcggcgtcgtagaggacggcaggatattggcgtaagatgcgagtttcataatatccggtgcatggcctccgccggctccctctatgtgatatgtatggataacccggtcgccgatcgcatcaagcgtattttctaaaaagcccgcttcatttatcgtgtctgtgtggatcgccacctgaatgtccgcctcatccgctgcttccatgcaagctttaatggcgcttggcgttgatccccaatcttcatgcagcttcaggccgattgcgcctgcttccacctgctcgatcagcggcgctttatcggatgcatttccttttcctaagaaaccgacattgatcggaaactcctcggccgcttccagcattctcgacatgtaccatacaccggatgtacaagtcgtcgctttacttcccgtcgcaggacctgttccgccgccgagaagcgtagtcacgcctgaagaaagcgcgacttccatctgctgcgggcagataaagtggatatgcgtatccaccccgccggccgttacgattttcccttcgccggaaatgacttctgttccggcaccgataatcatgtgcgggtccaccccatccatcatatcagggttgccgcttttcccgacgccgacaatccggccgtccttcaccccgatatccgccttgacgattccggtataatccaggatgacggcgtttgtaatgaccagatcaagcgctccgtctttcccggtgatacgcccgttctgccccatgccgtcccggattgttttccctccgccgaaaatcatttcttccccgtaattcgtgaaatctttttcgacttcaatccataaatccgtatctccgagtctgactttgtctcccgttgtcggtccgaacagttctgcgtattgctcacgtgacattttcatcggatcgcctcctccatccatccggcttttttaagatttgacagcgtcttctcttttccccgctcatccatatacgtatcggccatgccgttgaggcctctgaccgtttttcgccctccgatttccacgagcgtgacggttttctcttctcccggttcaaaacggacagatgtgcctgacgggatatcaaggcgcatgccgatggctttgtcccgattgaaggaaagggcgccgttggcttcggcaaaatgaaaatgcgatccgacctgcactgaccgtgttccgttattggtgactgacacctccagcgtcttccggccttcgttaatggtgatggtccctttgcgacttgaatcgctcccggcttcatgacttcacctccgctttgatcggctgatgaacggtgacaagcttaaccccgtccgggaacgtcgcttccacctgaatgctgtccagcatttccgcaacgccttccataacgtctttttccgtcaatacattgcggccggattccatcagctcagcaacgctttttccgtctctcgcgccttccatcagataacaggtcaaatatgcggcggcttcgggataattcagcagaacgccgcgcgccttccgctgcttagcgagctctcccgccgtaaaaataagcaatttttcttgttcaaccggtgtcagtttcatctgtattcccccttagtgatagtcaaacacaatccgcatggtcataccgaaacgatgcaggcggccgtcacccccttcacctcatgaaatgttaagtgataaaagttattcgacagtgaacggcccgattccttttgcagaaatgaccgatttctcatttttttcttcaacaaacgtttaattaaatgtgaagaaaggttacattctttgtgaatattataaagaaatcgccggggaatttatagaatatttaaaaatttagtgaatattaaccaaacgaactggaatttttgtcatttctcataacaaaaagcccaaaatattttgggcttttgctgtgtttcacgatcaaattaatcatcactgagtttatctttcgttttaccgacacccttttgcaggctgcctttcgctttgtcttttttcccttccgcttttaagtcggacttgtttgccatgtcgcctgctttgtcctttgcttccccttttattttgttcatgccgccttttactttgtcttttaaaccgttatcttcactcatgatctcttcagctccttttgtttttgtgtacttgttttcttccctttcagcctgatagcaaacatttcaactctcaattattgatttcacagcgttccccgtagcggatcactttgtaaacggccaatccgtctgacagcttattatccccgtattgcacgggcagaagagcaaagaaaacataataagttgaaaaatagacaaattggtaaaaaaataagtttggctctaggaaatcttttatgatcagcagatttattaaaaagatagaagcgagattaaacagacagcctccggaatagacgagcgcgctcgtcagacggttatctatccgcaattcgccgaacttgcagaaagaatctatgaagtagatacgccgaacctgaatcggccctacttttaaaagacgtttccccattccgatatccaacgacgccttgcctccgaacagcatggccataaagctgtgtcccgacacatggatgacagacaccatcgggagaatgatgagaaatgaaacgaaaaactttatcatatcattaaatccgaacaacaaatccctccttcccatcgtacttttttccctcttttgcgatttttccgattttttctatgatcaaacgtcctgatgtgcataaaaaaataaccatctgctgatcagatggttaacaaaaattatatatcgtataaacactgttctttttgaattttttctctcatgcgaatcgctttttcataaaaatacgccgcttctttatattgctcatgtgcgcttgtgtaaacggcggcctccaaggcgaaatcttcaatatacacatacagcgatttttcattcatatagtcaaacacttcatggattaaatccatattgagtgactccaaataaagcgcttgtaaaaacttatacttctctaaactgaatcggtcgccgcgttctttcgcgatcatgatccctctttcataataggtaagggccgcttggtcatcatgcagcctgaaaagggtgtgcgttaagctgaacagcgccttcggaagctgttcaagctgatgctcttcaaaaacgggaaccgcttttctaaagtaccgggccgcttcatccagatcccgcttttcagcataacaattccccagattgtaaagcgaagacccgatcaggcggggctgtccttcaagcaaagaaaggcggagggcttcgtctaaatgctcaagcgctttgtcgtagtttttgcagtcgatgtagtttcctgaaatgacgaaatggcattgaattctccgcactctgtaaaaatcgtgtttcatatacgtatccagcgcctgaatcccgtgattcatggaaaaatgagtctgcttcatgacgtaaaaaacttcagacatcttgaaatggaattccgccctctctatatcatcctcgacaaatgaaaggagtttttccgctttccggtaaaaagaaatagccgcaacatagttattgtgatcgaattcatacatccctctgaacaaatggaaataatactcagacagtcccgatatgctgtccgtgctttcgatcgtcttttgcagctcgctgtactgaatctgtgattgttcggtgcattccggcttgacgtaatcaagcataatatgatggcggtagctgatcagctgataatataacagcagcagctggtcttcctccatacgttgtatatcctcatcaatttcctctttcagctttatggcatcagccgcttgaaacgctaaaatgtgcttgtaccatttgttgatcttgactccaacttgagatgacggaatctcgtatgcggtcatgcccctttcacaaccttttctaatttctattggttatattttaacatattgtatggctttggaattgcataacttgattgtcctgcatcaaaattcctatcatatatttcggctgttaccggtattttttgaacagaccgctctcatattgtgaataaaaaagcctgcccttgtccgggcaagcttttcttcatccgcctatataagacatttccactttctttttcccatccgttttagaaagcgcgcggtcaattgaatactgatccgcgcgatttctccagacagaagcgatggattccgtcaattcatcatcggtcagaccgccgcgcacgagtttccgaacatcatagccgcttgacgcaaacaggcacgtaaacagctcgcctctcgccgacaggcgcgctctgttgcaggaggcgcagaatgcatccgagacggaggaaatcacgccgatttcgccggaaccgtcaagatagcggaacctggaagcgacctctcctttgtaattcgcttctatcggctccgtcggcatgtgctggttgatcagatcaataatttcggccttcgtgatcacgtcttttttattccattgattcgtattgcctacatccataaattcaataaaccggagaatatgacctttttctttaaaatagcgggccatcggcaggatatctttttcattgacgcccttttgaacaaccatattgattttcacaccgagtccggccgcttttgccgcctcaatgccctcaagcaccttgttcaccgaaacgccgcggccgttaatggccttaaaccgctcatcctctaaagaatcgaggctgactgtcactcgatgcagccccgcctgcttcagtttttccgcatacacgggaagcagagagccgtttgtcgtcatcgcgatatctttaagtcctgggatgcgcgcaagttttttgatcaattcaggcatatcttttctcatgagcggctctccgcccgtcagcctgattttttcaacgccgaagcggccgacaaacagcttcgcaagccgctcaagctcctcgaaggagagcaattccgtcttttgtaaaaatggataatccggtccgaataattcggctggcatacagtacgtgcatctgaagttgcagcggtcggttacagagatacgaagatccctgagcggcctttcctttttgtctgtcacccggcgcgtttctgtattcataagcccaagacccctttctattgttcaacccgttcaggatgtgtgtatacgttaaatgatccgtttctgacaaaaccgatcgcggtgatgttcagctcttccgccatttgcagcgcgagctccgtcggcgccgattttgaaatgacaatcgacacgccgatttttgcggcttttaataaaacctctgaggaaatccggccgctgaagacgatcagcttgtcacggacgggcattccgtttttcaaacagcagccgtacagcttatccagcgcgttgtggcgcccgatatccgtcctcatcaagagcagcttttccgtatcgcacagcgctgcattatggacgccgcccgtttcccggaaggtgccgcttccgctttgcatctccttcatcaggcgaaggcacgtctcaggagttatggtaatccggctgacggcggttttggccgttttcacatcctgctgaaagtaaaaatggcggcctttcccgcagcatgaaccgatgaccctcttcgtatagtctttttgctcaagcactccgggattcgtcagttcaacatatgcgaacccgagactttcatctatagtaaagcttttgatctctttttcaaaacgaatgacgccttctgatgcgagaaatccgatgacgagttcctctaaatggtcaggcgtgcagacgagcgtaacaaattcctgcccgttcaccatgacggtaagcggatactctgaaaccatccgatctgccgtctttgttaatacccctttttcatagcggtatatgtctcttaccgctgttgttttttcatccactgttttcccctccgcagtatccttctcttttattcttccacaatccctgtattttgtcgaatttgcggtttaaaaaaagagccctcttcggactctatgtttcattgcgatgatgtctgctcagaatggtgaataaaataactgcggcgataatggccaatatactgacgaatatgaaggcggcaagcttcagaaaaatccctatcagaacaaaaacgactgccgccagcaccaatataatgcctgctccttttaacaacagcgttcatctccttttatccgtatcattcccgcggttccgttttctaaacaaaaaaagacgccgcacgggcgtccttttttaacctattcttttgctaaatcctttgcggcgtcttcccaagcctgtttgaactcgtccgcgctgtcagctgagacgtatgtgccgcctcccgcttccgccgctttttcaaggctttcgcttcctttcatgccgaagttgaagccgatgatattgacgaccgtgttgacattcgctttacggagcttttgaatttcggcttgaggattcccgccgcatgtttcttcaccgtctgtgatcagatatacgacgtttttccctttagcgccggcccgctcaaattcttcacgtgtatcagaaagcgctttcgctatcggtgtccagccggtcggtttaatcttgctgagtgattgctcaaatggagtcacggcgtacggctgaaggccgtataacgtttctgtcgcgttacatgatacggctttgcctgagtttttattattgcccttatgcccgaatacccgaagcatcagattcgtgtcttcaggaagaacttccgcaaaagaagtgacagactctttcgcaacatctattttacgctctccccctgttttttgtatcatgctcccgcttgcgtcaaacagcacggcgacgtttgtttcttcgtgctttttctcagctgcaaaaacaggtgatccgagtgaaagcgtcaaaagtccgacaatccccgcagtgaacatttttttcatttccttcattcctctccgtttgtttttggccgatgggcccccggctcttctctatgctagatgaggagtatgcaaaaagatatagggcgggattccttttgtataagcggctgtacgccgttaaaaatgaacagaattatgcgcatcatcctaaaaagattggataaatgatgacagatttaatgcctttttcgccctttttgtaatataagtccggaatctgattctttttacagttttctcttcatcttttcttgaaatttttgttaaataaaaataaaaaaaagggccgctaaacggcaccttttcttatttcgctaatgaactcgcttccatcgtaaagatgcggttcatatccttttggctgtgagcttcgtaatattttcctccgcccgcaccggcaattgcgtgaagctgtccgttgaagccttctttaaagtcaaagccgatcacgttgactttaatatgatgtttgcgaagttctttcgctgtcttaataggatctccgccgcatgtctcctcaccgtccgtcaacaggtaaacggatttaaagccgaatttatgaacgccgttaaaagaagccttcgcatcttctaatgcttttgcaatcggtgtccagcccgtaggcccgattccgttcagagagttgaggaagctctgtctgtcaaacttttggaatccgtatacaccgcgaatggattcacaagattgaacttttccggagtttttattattgccttccgaaccgaaaaccgtcattctgacctgtgatgtagacttaattcgatctgcaaaacggacgatttcatcttttgccatattgtatttagaaacgccgtcaatccgtttcgccatactgccgctcgcatcaagcagaatggcgatattgtttttaaataaaaatgtcttctcgtttgcattctcggcagcaaaagcaggagatgcagcagtcagcatcaatccgagcatgattatgagtgaaagtgtttttttcattgcttcttccccttttcaatagatttacgttcaacgccgaacaatatttatcgtaaatgagatgaaaagggaaataaataggacggcgttcctcattatttttgcgtatattcacatagatacggcatttttatcagtgattttcacccggcgctcagccttcagacggcatttgtcagcctttaggctttcgttatatgagtctgttggttgctttaccgtttatggaatagttttcaaaaaaaacagacgctcatgaaagcgcctattttttcgccatatatttgtttaaaaatgaatctgcttcggatatgtccactccctgataataatgcttgacgatgtccgccacggatttcccctgctccgccatgtaattggccccgtactggctcatgccgacgccgtggccgaatccttttgtcgtaatggtgatgctgccgccgttccgtttccattcaaagtcggcagaacggagtccgagtttttcccggatgtctcttcccttcagctttttgccgtttatgacggccgtcgccacttgatggcccggcgttctggctgtaatctgccctaccgtgttttgtcccgagagctgtacgccgagcttttgctgaaactccggcacactgaaggtctgggtggcaagatatttcggcgattgcttatcccacggacttttcacgctctttaaataaggaatggcgcttgtccaataggcttccgcattttccgtatacccgttgctcgtagagaagaaagatgcctcaatcggcttgttgtcgtacgttaaaatctttccttgcgtgcctgcgaccgcgtttgtgattttcttgaggttgtgtgcgtacttagaaccccattcttttttcagctggcttttgctttgatagacttggaacatttgcgtatcgtccaccagtgatcctttcggcgcctgaacggctgagtcagcaaccatcaatctgacgatgaatgtccgggcggcgagcgcctgggcttttaaggcttccggtttaaaggttgcgggcatttcggaagccacgacaccgatcacgtactcttcaagcggaatgttctctacagaatgattggatgtccgataaaccggaatggatacaggtgattctttcaatgtttctgctccttttgtttctcgtgtggtgtgtgttgttttgtgtccgggctctctgtttacggctgctcctttttccgcctgaaacggaagaacgagaatggtgggaacaagaagaataagtatacacagcccggatagtagaaatacaatcggtttcatatatcagctgcctcctgcttgggattcgactctacttcatcttatgggcagggacaagctaatatgacttccttttggacagaatcttattccatttttcacgcgaaaaacgtattcttttttgaaaatcagagcataataatgatgataaaccataaaaaaacagtatgccagattgacatactgtttttacagccattatgcgtttaggtcagttacgacttctttgctttcttgttcagcggccgtttcatcaacgacacgctcgatgtcagcgccgagagccgcaagttttttatggaaattcacataaccgcgatccaagtgcttcagttccgtgacgcgtgtatgaccttcagccactaatcccgcaagaatcagcgccgcgcccgcacgcaggtccgtagcggcaacttctgcgccttgcagctgtacaggaccgttaatgatcacagaacgtccttcaattttaatgtcgccattcatccggcggaattcttcagcatgcataaaacggttttcaaacacagtttcagtaatcatgcttgttccgctcgcacggagaagcagcgccatcatttgcgactgcatatcagtcgggaatcctgggtgaggcatcgttttaatgtcgatcggcttcagctgggcaggaccgatgacacgaaggccttctccttcatccgtaattttgactcccatttcttccattttcgcaattaaagacgtaagatgctcaggaaccgcacctttgactaatacatttccttccgtgatagccgcagccaccatgaaagtacccgcttcaatacggtcaggaatgatgttgtgtcttacgccgcgaagcttctcgacaccttcaattttaatggtgcctgtgccggctccgcggatttttccgcccatcgcattgatatagttcgctaagtcaacgatttcaggctcttttgccacgttttcaagcgttgttgttccttcagctaaagcagctgccataatcaagttttctgtcgcacccacacttgggaaatctaaatagatttttgcgccctgcagacggccttccacttctgcttcaataaagccgttgcctactttgatttttgcacccattgcttcaaagccttttaaatgctgatcaatcggtcttgagccgattgcgcaaccgcccggaagcgctactcttgaatgacccgtacgagctaacagagggcccataacaagcactgacgcgcgcattttgcgcacatattcaaaaggtgcttctgtttctaaagcgtaagaagcgtttacggtaacttcattattctcaaaatgcacatctgctcctaaatgacgcaacacttcattaattgtatatacatcggagagcgtaggtacatcacatattacgcttttttcttcacttgctaataaagatgcagcgataactggtaaaacggcattttttgctccttcaactttcactgtgccgtttaacttctgaccgccgcggacgatgattttttccaaggtattcccctccgcgtccctatattctctatattaatattcagttgtcacgattggtgtgccaaccgtaacggtatgttttccgcccattcccgcacttctaagcgcaacttgcacattcatcttatgtttcgatgtcatgatgtaatctgtccacttatatgtaaatgcagaaacagaaacgaaatgaggctcaactacatgttcaactggacttgcttcaaattctttcatgagctgttctgcttttttttgcaaaacaatactcatattatcatttaaatgaccctttagacaagtaaaaataaatactttattttgaaatatgtcatgtgcctgccgttcaaactgttcatatgtatcattccagttttccggttgctccgggctcatttgctcatataataaatacgaagttgggttctggtttttgagggtagtgacgagctgcagtttaaaagttgtgtgattttttttgtcagaatacgtgccgacggcctttacgattttatcttcccgcgcggattcccaatgatattgcggatactgcgtcttcagttcttttaccttgtcatcaaattcactcagtgacaggttcagattttttttcgcatgaagcgtccattcatccacagtgacctgctgccgctccattccttcggcaatctgggcaagcggagacagctcacttgcatgaatggaatgaaataccgctattaaggcgcttaaaaaaacaaaaaacaagatgatacggcctgctctttttttcttcatatcgatctctcccccttactcccatttttgccggagccggggaaagcaatacatggaaaacttcgtcaaaactcgccaagcgggtgaagaaaaattggtttctcacccagcgattcccttcatttcaacagacgaaacatcttaaaataagtatggaagctgtttcgaataggtaagataatctaaaaagaagttggcgactgccgtaccgatcgcaatggtaagaagaatgatcagcagcctcgcctgcactatttttccttttcggatcagcggatcaaagttgacggcctgaagcgcccaccatgtcaccgcaatgcataccaggtgaaccaggatgctgattgcggcctgctgccccaatacattcacaaattccatctcctttcattttttccgcccctcatatcctctcttattatataagaagaagagagaaagatgatcatttttacatcagaatttttatccaaaattaggggcaatccccgcttaaatgtccgttctccggcatgatatacttttttggaaaggagatgggaatatgaatcattccttttttcatccggaaaagcagtatggagaaacacttcccgtatttgaccacgagtgggaagcgatagcattctactatgattatagacagtctcaaacagaggaactgaaagaattatgtcagtttttcaacatttctcttgattattcacccggcagcctgctggcagtggaagctctttacttccgcagcataaaagagctgcttttggcggattggaacctgccgattgacgaatttgagaaaatgctcagtgtgtatgtcatcgattgcgccatcagacatcatgacgatgccgaatgggtcgtcaaaccttatccgtatacggacggcgcttatacgacgggtgtgcggagaggaaacaaaacgtggcacaccgacaactgctgcgaacatttatatctgcaaaaagaagaggatcatccgcttatcggcgtctatgaatctcttatgcgttaatatagaaaaagaatccttctcagacagccgagaaggattcttttttagtttcctgcaacatccaatctgtttacagcccgctgtaacgcaagctcagcccgacgaatgtcagtatcatctgatcgtttgttcaaacggtcttccgcccgctttttcgcagcaagggcgcgctctttatcaatgctttccgctgtttcagcggcttgtgcaaggatagtgacctgatcaggacggacttctaaaaatccgccgctgacagccgccaattcggtctgcccgtcttttttaaggcggacagcgccgattttaagcggagccacggtcggaatatggccaggcaggataccgagatcaccgctctcggctcttacactcaccatttcaatatcagcatcatatactgggccgtcgggagtaacgatattgactttaacggtcttcatgcttttaccctcctaggaccagattaaacttctacacccatctcttttgcattctcaatgacttcttcaatgcgtcccacaagacggaatgcatcttccggaagatggtcatatttaccggaaaggatttctttaaagcctcgtaccgtttctttaacaggcacgtaagaacccttttgtcccgtaaactgctcagctacgtggaagttttgagaaaggaagaactggatacggcgtgcgcggtgaacgacaagcttgtcttcttcacctaattcgtccataccgagaatcgcgataatatcctgaagttctttgtaacgctgaagcgttgactgaacttcacgcgccaccgcataatgctcttctccgacaatttccggagcaagcgcgcgggaagtggaagccagcggatcaaccgcagggtagatacccatttcagttaatttacgctcaaggttagtcgttgcatccaagtgagcgaacgttgtcgccggagccgggtcagtgtagtcatcggcaggcacgtagatcgcctggatagatgtaactgaaccaacgtttgtagacgtaatacgctcttgaagctgacccatttctgtcgcaagcgtcggctgataaccaaccgcagaaggcatacggccgagaagcgcggaaacctctgaacccgcttgtgtgaaacggaaaatgttatcgataaagaacagtacgtcctgtccttgtttatcacggaaatgctcagccattgtaagacccgtcagtgctacacgcatacgtgcgcccggcggctcgttcatctgtccgaagaccatggctgttttcttgataacgcctgaatcgctcatttcgtagaaaaggtcgttcccttcacgagtacgctctcctacaccggcgaatacggaaataccgccgtgctcttgcgcgatgttgttgattaattcctggattaatacggttttacctacgccggcgccgccgaacaatccgattttaccgcccttgatgtaaggagcgagcaggtcaacaaccttaatccccgtttcaagaatttcaacctcagttgaaagctcatcgaatgaaggagctgatctgtggatcgggtccttttgagcatccgcaggcagcggttcatttaaatcaattttatctcccagtacgttaaatacgcgtccgagagtcacatcaccgactggaacggaaatcggcgcacctgtatcaacggcttccattccgcgctgaattccgtccgtagatgccatggcaattgtacggactgtatcatcgcctaaatgaagagcaacctctagcgttaggtcgatgcctacttcattttcgcctgtagctggctgtgaaactttaatcgcattataaatcgcaggcaagtggccgtcctcgaaacgtacgtcgacaaccggtccaagcacctgacttacgcgtcctttcttcatcgctatccctcctgacaaaatctttctattctaaagcggctgcaccgccgacaatttcggtaatttcttgtgtaatcgccgcttgacgcgcgcggttatatgaaagcgaaagtgaatcaatgagttctttcgcattatcagtcgcatttttcattgctgtcattctcgcagcgtgttcacttgctttactgtcaagaagcgcgccgtaaattaagctttccgcatattgaggaagcagcacttcgagcacctcttcttcatccggttcgaactcgtaagaagccgtgcgcttcccgccgctcgttccgaaatccgttaaaggcagcacttttttctccgtcacttcctgtgaaatcgcactgacgaaatggttatacaccaaatgcagttcatcaaaagcgccgtcgataaacatttgaaccgtctgacgggtcaaatctttaatctgagcaaaagtgacctcgtcgccaagccccactaactcagacaaaatcggcatctcccgttttttgaagaaatcgcggccgactctgccgattgcaatcaccgtgtattcatctttagactgatggcgttcttgaatggtgcggtaagcgtttcgcaaaaccgaactgttaaacgcacccgcaagcccgcggtcagacgtaatgacgagatacgccgtctttttcacttctcttgagacaagcatcgggtgtttcgcgtttttcgcgccttttccgacgttaaacacaacctcctggatcttatccatatacggagcaaatgacttcgcgttggtttccgcacggttcagcttcgcagcggataccatctgcatggcttttgtaatctggcttgtttttttcgttgacgtgatccttgacttaatatcgcgtaatgaggccaaagatttcaccacctttattcttcatttgcgtaaaaagagagaaaaagagaacctttttctctcatcttctaagggttagttgcttggtgcaaatgtgcgtttgaagccttcgattgcagctttgaagtcttcatcagcaggaaggtttcctgttttcgcaatgccgtcaagcagatctttatggttttgatcaaggtacatgtagtactcttcttcaaaacgtctgatatccgcaaccggaatatcatcaagatatccttttgtcagcgcataaagaatggctacctgtttttcaaccggaagcggcttattcaagtcttgcttcagcacttcaactgtacgcgcaccgcggttcaatttcgcctgagtcgcctggtcaagatcagatccgaattgggcgaatgcttcaagttcacggtatgaagcaaggtcaagacgcaatgttccagctacctttttcatcgctttgatttgggctgacccgccgacacgggatacggataatccggcattgatcgcaggacgcacgcctgagaagaatagatcggattgaaggaaaatctgtccgtcagtaatggaaatgacgtttgtcgggatataagcggagatatctcctgcttgtgtttcgacgaacggcagcgccgtaattgatcctgcgcctttagcgtcactcagcttggctgcgcgctcaagcagacgggagtgaagatagaatacatccccagggaatgcttcacggcccggcggacggcgaagaagcaatgacagctcacggtaagcggccgcttgtttggataaatcatcatatacgacgagaacgtgcttgccgttgtacatgaattcttcacccattgtcacccctgcatacggtgcaaggtaaagaagcggagccggctgtgaagcggatgccgtcacgacaatcgtgtaatcaagcgcgccgtgcttacgaagtgtttccaccacgccgcgtactgtagattctttttggccgatcgctacgtacacacagatcatgtcttgatctttttggtttaagattgtatcaatcgcaacagatgttttacctgtctgacgatccccgataatcagttcacgctgtccgcggccgatcggaattaacgcgtcgatcgctttgatacccgtttgcagcggctcatgtaccgatttacggtccattacgcctggagcctggctttcgatcggacgtgttttgcttgtcagaatcggacccagtccgtctaccggctgtccgagcgggttgacgatacgtccgattaattcttcacctacaggaacttccatgatgcggcccgttcttttgacctcatcaccttcgcggatatctctgtaaggtcctaagataacgatacctacgttggattcttcaaggttttgagccatacccaaaacgccgtttgaaaactcaacaagttcaccggccatacaattgtcaaggccgtgtacacgcgcaataccgtctccgacttggatgactgtacctacgtcatgaacttcaatttcagattggtaattttgaatttgctgctttatcagcgtgctaatctcttcagctttgatgctcacttaggtttcaccccttctatcgatttcctccggcaagttgacgttccatgcgctcaagctttccgcttacgcttccgtcataaatccggtttccaatgcggactttaatgccgcctattaaatccgtctgcacttcatttctgattctgagcgaagcgattccggctttttttgcaaacacttgagacaatgataacatttccgcttctgaaagcggctttactgaataaacaaccgcgtcctctgtctgacgggcctgattggcaagtttgataaactcgtctgtgagatcaggcacaatcgaagaccggcggcggtcaatcagaagaaaaatcgtatgcagcacagactcagacagtgcgccgaacgattgctgaatcagctcttttttcttagcggccgataccttcggatggcttagcacttcctgtaatccggcttcgtttcggaacacttcttttagtacggtaagctcttcttcgatttcattgatttgagaagtctcaacggcaatgtcgaaaagcgctgacgcgtatcgtttagagacagcagatccactcatcggctttctcctacctctttaagatagtcctgaatcagttgttcctgggcttgttcatcaagctctttttcaatcactttcgatgcgattaagacagaaagtgatgcgacttgctcgcgaagtgcggaaaccgcttgttctttttctttgacaatttcggttctcgccgcttctttcaatctttcagactcggcgcgtgcagcctggataatgtcttccttctgcttttcacccagttttttcgcattttcaatgagtgattgtgattcctgtttcgcttcttttaaaagaacgcgctgctcttcaatcagcttctgcgcttctttatttctttcttcagcggacgtaatttcgccggcgatatgatcttcacgctgtttcattatatttaatagcggtcccagagcgaatttcttgagaagcgctaataaaactaacatagctaacaattggaataggatatctccgccgttaaacgacagtcctaattcaagaggtaattgagacatctactacggcaactcccttctgcaggttttctctgctgataaaaagccgtttcgggacggcctgcttatcagacataaagcaatggcgaaggttctcttagagtgatcttcgccatttttagttcatataaggcttttttgcttagccaaagaacgctaagaacgcgataacgacagcgataatcggaagggcctcaaccaatgcgatacccatgaacataagagttctaagttcttttcctgcttccggctgacgggcgattccctctaccgtacgtgaaacgatcagaccgttaccaatacctgcaccaagtgcacctaaaccgattgcaattgcagctgctattaaattcatgaaaaagttcctcctttaaaatgttatccgaatggatatatgattttaatgatcatgactgattttgtgtgacatgtacaccatcgtcagcatcgtaaagataaatgcctggatggtaccgatgaacaagctgaatgcctgccatgcaagcatcggaataatggctccgactgtgccgaccaaaccgagaaagaaactgtttgagtagaaattcgtcgccagattcgcaagcaggccaagaagaatttccccggcgaaaatgttaccgtaaagacgaagtccgagtgtcagcgtattcgcaaactcctcaatgatcttcatcgggaacataagcggaaccggtctgaggtaatccttagagtattccttcaaacctttcatcttcacgccgtaatagtgcgttaacgacacaaccataacggctagagtcagagtaatagccggatcagccgtcggtgatttccaccaaagctcgtgtccgaccgttacagaaaacggcagccctagcatatttgatacaaatatgtacatcagcaaggttacaccaagcgccaagaagttagcccctgtttttaaatccattgtactgcctataatattgcggacaaaatcaacaatccattccatgaagttctgggcttttcccggacggatggacagcgttcttgtagtaagaatcgcaatcagcagcacaatcacacttgccacagtaatcatcagaatgtttgtcagattaaaagtaagaccaaacaaatcaatagttctgtaatcgtgattcaatgggttttcacctctcttccattgatgaacgtttgagctgaataatggaatctatcataatgacgggataaattgtcattaatccaataatcacacttgccacactgactttatcgggatatttaaaggcgacagccatcgcaagtatcgcattgcaccaacgcgctgcgctcccgagtgatcgtatggactttcctttcgccacggccttgtcaaaagcattcattcttctggtcaagagccacaaattaaacaaactgaaaacagttcccaaaaagaggcctaaaaaaacagttttatacgccgtaagaccatatcccagcaaatagattgctaagattacaaatacatatctccgttgtctgctgaatgtaagattgggatcgtccatcaactatctgtctcctgatgaaaatgtaatataattcctggatacggcaaaacatgcggttaacccttgcagaaggccttttttgtccgcaaaacggcctgttcgaaaaaaccactcatcctcctgatgctacgggatgctgtttcattcgcttagataaatcctcatataacgggtttttttggaggatttaaaatgaggatggatactagaaatgaaaggaatgaaaaccttctcataataccctcgtttagcatacaatagccctaacatgtgtcaatctgtttaaagttaaaaaactttttataccggaagcatacacagaatgttcacaaattcacctataaatgtatgacctctgcccattcagctaaaatctggataaaaaaaagaaaacccctgaatgaggttttccgatttatttggttccgtacagtctgtcacccgcgtcaccgaggcccggaacgatatagcctttttcattcagtttttcatcaagggcggcgatataaatatcaacgtcagaatgatgtttctgcagctcttccacgccttccggagccgctacaagacacataaaacgaatgtttctcgcgccgcgctttttcaggctgttgatcgcttccaccgcagagcctcccgtagcaagcatcggatccacgacaataaattcgcgttcttctacatcagaaggaagcttgacatagtattccaccggttttaaggtttccggatcacggtataatccgacatgtcccactttagcggccgggattaatttcagcatgccgtcaaccattccgagacccgctctcaggatcggcacgataccgagtttcttccctgaaatcactttggatgtcgctgtttgaacaggtgttttcacttccacttctttaagaggaagatcacgtgtaatttcaaacgccatcagtgatgcgacttcatccacaaggtctctgaaatcctttgtgcctgtattttcattccgaatatatgtcagcttatgctggattaaaggatgatcaaatacgtaaacctttcccatactgtgttcagctccttttttgttgtccgagtgactttttcacacttctattgattctacagaaaaagacaaacagtttcaagaaaatcataaaaaaacccgccggattaaggttccggcgggtttcttccttattaatagtccagttctttatataaaggaaacttttcagtcaaggcagatacgcgctgtttcgcttcttcaagttttgcttcgtcttcatgatttttcagcgcgaggccgatgatggcgccgacttcttcaagcgcgtcaccgtcaaagccgcggcttgtcacagccgccgtaccgagacggattccgcttgtgacgaacggtttttccggatcgtaagggatcgcgtttttattagatgtaatgccgatttcatcaagaacgtgttcagcgacttttccggtcagtccgagagaacggaggtcgacaagcacaaggtggttatccgttccgcctgatacgagctgaataccctctttgttcagagactcagccaggcgcttcgcgttcgagatgacgttttgcgcatatgttttgaaatcatcttcaagcacttctccgaaagaaacggcttttgccgcgatgacatgcataagcggtccgccttggattcccgggaaaatggatttatcaatcttcttgccgaactcttcacggcaaaggatcattcctccgcggggtccgcgaagtgttttgtgagtcgttgtcgttacaaagtcagcgtaaggaaccggattcggatgaaggccggctgcgacaagacccgcgatatgcgccatgtctaccatgaagtaagcgccgacttcatcagcgatttcacggaattttttaaagtcgatcgtgcgggggtatgcgctcgctccggcaacgatgagtttcggcttatgcgccagcgctttttcacgcacatcttcataatctatatattgcgtgtctttatcgacaccgtattctacaaagttgtattgaacgccgctgaaattaaccgggcttccgtgtgttaagtggccgccgtgggagaggttcatcccgagcaccgtgtcgccgtgctctaaaatcgtgaagtaaacagccatgttcgcctgagcgcctgagtgcggctgaacgtttacatgctcagctccgaaaatctctttcgcgcggtcgcgggcgatgtcctcaacgacatcaacatgctcacagccgccgtagtagcgtttgccggggtagccttcagcatatttgtttgttaaaacagagccttgtgcttccattaccgcttccgtcacgaagttttcagaagcaattaattcgatcttagtctgttgacgcttacgctcatctttgatggcgttaaacacttgtttatcttgtacaggtaaatgtttcatcagcgagatcctctcctatccgtttcctgttctttatttttaccaccttattgtacatggtttttcaggtgaatgtaacagcttatttaaaaaaatcacaaaatttaattagaaaacacgaacattatagaggaaaagtattttcatcattcgcattcatatacggcgcgaattccgcctatcagcttcggtcttgtccgggccatcgtcacatgtgcttctccaagctcacggctcgatatccggacagggacggcaacgggtttcagatgcatgccgatgaacgtatcaccgatgtcaatcccggcgtcagcctgaatcgattcagcgagcactggagaacgcatctgccggtatgcataagaggccatcgctccgcccgctttcgggacggggacggctgaaacaatggggagcctgaaccgctcggccgtttccgcttcaatgacaagcgccctgtttaaatgctcgcagcattgaaaagcaagatgcacacccgttttttccttaaaccggttaagtccgccgtatatcaattcagcccaatccccgcttccggcggtgccgatccggcttccggcggcttcacttgtactgcacccgaccaccagcagactgccgtccgtcagtcctgcctgctcttgaaactcagtcagcatgtccgtccatttttgcttcatctcttccattgtccagcacctcttacagatttttttcttcgtaatctgcgattttgccgatccgccgttcgtggcggccgcccgtaaattcagtcgtcagccagacttttgcgatttcgcgcgccagccccgggccgatgacgcgttcgcccatcgcaagaacattcgtgtcattgtgttcacgcgtcgcttttgcgctgaaggtgtcatgggcaagcgcacagcgtatgccctttaccttatttgcggagatgctcatgccgatgcctgtgccgcaaattaaaattcccctgtcagcttcgccgttcaccactttttccgctaccggaaaagcgtagtctgaataatcgacagagccggcgccgcattcacagcccatatcaatgtattcaatctgcaattcatccaaaagactttttatttcttcgcggatatggacgccgccgtgatctgacgcaatagctactttcattcatttacctcctaggtgtggctgggcgaagacagcccagtgtgcttgtcctttttattacgaaatccgttgatttcattctactctttcacattcgttttgcaaatgacctgtttgcagattttctgacagattacttgcttttcccgtcaagcaattgatcagccaaaagggtcagcagctcctccagttcgtcccgcgtctgtttataaacatcaagcggaccgccgaacgggtcagagatatcgccgctttcccccgtcacgtattctttaatggtaaaaactttgccctgactgttttgatatcggccttcaatcagctgtttatgctgttcggtcatcgccagcaccagatcggccgtctcgatatgttcttccgataagggagatgaactgtgattgagggcgatccgtttttcaaacagcgcttctacggcatgagccgacgcttttccgtgcggagacgcgaatacgccggccgagcttacgctgacatccagccctttcgtttctgctatggatttaaaaagagcctcagccatgggactgcggcacgtattgcctgtacaaacaaagattattttcatgtccgtcacctcttactacctattataaatgaagaaaaaagaaacggcatcttcgtttctttttttacgtatcttatatcggtaaaagcagtttcagcccgaatccgatcaaaatggctccgccaagcgcttcgctgtaggagccgagccatgactgcacctttcttcccgccaaaaggcccgcccatgttaaaacggtgctgaagaccccgaacagcgtaacggccagaaacggattggagccgttcatcccgagactgagcccgacagaaaagctgtccagactgacaccgaccgcaaacagcaacagtcccgagcctgccggagatatgagcggcccgtccgattgtttaaacgcggcgatcatcatctgcacccctaaaatgaaaagaagagatccgccgatgtaaacggcgagcatccccagaaaaccggacagcagatgcccggccgccattcctacaagcggcatcatgacatgaaacagcccgatgacaacccctatatgaaaaatctgttttttcttcagctgaatcattcccattccgagcccgacggaaaaggcatccgtccccaaagcaaatgccatgatgcttaaggagacaagttccccgatgaatagattcgacatgaataaaaacccccttggacgtgcccgcttgtttagcttatgcatgtccgataaggggtagaacaagttaatggataacggtgccgcctgcggctttcatcagcctgttcataacggcgagccccactccggtatccggaaaggactcagaaataatcatatccacttccgcttcatcaaagctgcggagcgcatcgtataaggcggacgccactgtttcaaggtcggcgcgtctgccgcagaccttgatataatcagcctggtaactatcggcgttctcttctgttgtcaaaatgccgattcgttttccccggcttttatatgcgtctgccagttcttgaattctccgggcgccgccgtcggcaatagccatcggcgcagaaggcgcgtaatgtgtatatttcataccgggagaaataggaacctcatcttcttcggtcagtcctttatccacaagaaccggaccggcggcggattcaatctgctcttttgtcacgccgcccggacgaagcagcacgggctgtttccccgtacaggacagaacggttgattccactccgattcccgtcgcgccgccgtccacaataccggcaatacggccgtttaaatcatgagctacatgctcggccttcgtcgggctcggttttcctgataaattggcgctcggcgcggcgatcggcagtccggccgagctgatgagggctaatgctgccggatgatcaggcattctgaccgctaccgtctccagtcccgcggtgacacggggtgacagcacaccgggcttacacggcaggacaagggtcagcgcccccggccagaatagctccataagctttttcgccgtctcaggaatatggctgataaaacgatcaagctggctgatatgggatatatgcacaatcagcgggttatcgctcggccttcctttcgcctcatatattttcgttacggcttccgtattttcagcgttagcgcccagtccgtaaacggtttctgtcggaaaagccacaacctcattctgccggagcaattccgcggcttgtgtaatttggggatcggttgtggataattctgcggaacaatccacaaaccatcttcttgttttcatgtataaccaaactccttattttaaagcggtaaaactttattttctctcgtgtattccttttgaaagtataaaagatgtcctttaataaaacaagcgttatccacaaactgtggacaacactttttaataagtggataaccttgtgtataagttagatcaggcagaggttttcaccattaaaaacgaaccttctgtgcataacgagttgcggaaatgttcggacgtatacagttcctcaggcgcatcggcgcacgcttcaaatcccatcacattcagaaactcagcagatgagggctgattggcgactaagtagacatcttgaatttcatgttttttgcacagcacatccatactttgaaacagtgtaacgatatggctttgattcagcctgtccgacatgacgagtgaacggagaagcccttttccgccgctgaatttttcgatcccgagacaggcggcaatctttttttcgctgtcttccagcacgataaaccggctgatctgctgatcgatttccgcatgtgccgtatcagactttttcaaaaaggcctccagcgcctccgtatcttgatctcttgccactctcagctgataaaacatatatttccctccgtttcgatcaactctttcttccaatctatgaatcgaatccggatttatgccttttgcttcaggaaaatagatctgaaatccaatcgacgaggaaaaacttcacttcggtatcatcgtcatctttattttctttcttcgctttatcggcctttgcttttacgtcatccagcactttttctgtctgtttctgcgtttcttcctgcttctgtccgccgtcttcctgatctttcaccgcttcgccgtttgagaaatcaaggaagcacagcggcggaaacaagacgcaccaccagttggcgccctcgccattgccgagtgtaattaaaatggcttcatattttccggccggatagaccatattgccgtacagctttgtcggaaacgagattttattgaattgaactgaaacggattgatgcgcacccttttctttcatcgtttgtttggcgatttctttaatttcaggaagcttcgaacgaatgagccgccgcgcttcttcaatggaagtgatatctttcacccagtccgtgatttgcttgtttacagcatctctgatctggcgcttgagcttttgatcctcatcgttatcactgttggccaaaatcctgagccggatcgcttcatccggtatgacgacgggctcatcggctgatgcccgcgccgtttcttcttttgtcaaacccgcaagcgctcctgataataaaagaaaaatatatatgcagatcatcattgtctgtttcatcggtccccaccgttcctctccgtgctttttttatctagtcccattatggacatgacggaaaaggtttaaaccggcgggaagaaaaaaatctagcaagctgataatctgcattgacagattcaaaatatggtacgatattattttgataggaggttttcagatgaaatataattacaccgtgctgctgtcggcggcatgtatgtctgtcatttattctattttgtatgttcatcaattcattatcgcggctttcatttcgatggcgttttattttttgtttccttatttgatttttgcgctgccgcttcaatactttctgaataaaaagccgaagagatttcatccgctgtattttctttattatttgggggtgtcgttcattgcaaacgggatcatcttcggtcttttgcagccgtcaggccaatctctgttttctaattcagccttttatatctttgcggttttaacagccgtcgtctattgggtatgggattccgtattgctgcaaagacaaaatccggctacagaagcgtaatcagcagacagccggctgaagggagagcggcgcaaaagaaaacggcggccatctttaaacgggcgcgccgtccttcttctgtttcagaatgataattggcccgctgctccgctccgcttacggccagcccggaaacgatgaccgctgcgacgataagaacagccgtaacggcgccgagaatgatgtcaaagccaaacggcaggacaaatccagccgcataagctgcggcggcgagtatacatccgaaggcgaacgcttttttcaaggcggatgcccctttcattttctttccattgtaacaaaagcccgccgtgtgcgtcaccggcgggcttttttcatgatgtgatgaccgcggatacggttctgtcttttccgttgatgtcctgtacgacttccacttccgcattcggaaaggaatgacggaacaggtctttcacggcttttccctgattatatccgatttcaaagacgacaagcgctttatctttcatgacaagaggcagctcctccataaaccgcttgtagaatttcaaaccgtcaccgccgtccgtaagtgcatgaagcggctcatggaaacggacgatatccgacaaatccgccatttcttcttcagaaatatacggcggattggaaacaataatatccgcttttattcctgatgaaataaaaggagttaacagatctccctgcaaaaagcggacgtccgctccgaggttttgcgcatttctttccgccacctgaagcgcttcttttgaaatgtccgaagccgatactgaaaaatgtccgcattcaagcgcgagcgtcaccgcaatggctccgctccccgtaccgatatcaatgacgttcaggcgttctccctcagaaaacacccgcttctgtctgtccagcagatgaaagacgacttcttccgtttccggacgcggaatgagaacatcgtcattcacaaagaattctctgccgtaaaactgttctttcccgataatatattgaatcggaacgccttctttatgcatttccacatgccgtctgaatcggtaaagctcgtcctcgccgacgggctcctgcagacttgcgagaagcttgctccgatccattccggtatcatttaacagcagcagctcggccgcgtttttttctcttcccgcttcggttaaataagaagaagcccagcttagggcttcaaaaacggtcttcatcttaattttccgcctgctggagcttgcttgactggtcttctacgattaacgcttcaaccacttcatcaagcttgccttccaggatttgatccagcttttgaatcgtcaggccgatacggtgatccgtcacacggttttgcgggaaattgtatgtgcggatacgctcggaacggtcgcctgatccgacggctgatttacgggtctgatcatattcagcctgagcttcctgctggaatttgtcatagattctggcgcggagcaccttcatcgctttttctttatttttaatctgagatttttcatcctgacaggatacgacgacaccggtcggtaaatgcgtcaggcgtacggccgacatcgtcgtatttacgctttgtccgcccggtccgcttgatgcgaatgtatcgacgcggatgtctttttcgtggatgtccacttctacttcttccgcttcaggaagacacgccaccgtcgccgtggatgtatgaatacggccgcctgattccgtttccggcacacgctgtacgcggtgcgcgccattttcatacttcagcttggagtatgcgccttttcccgtaatcataaagatgatttctttgtaaccgcccgttccggtcacgtttgcttccatgacttcagtcttccagccttggatttcagcgtaacgggagtacattctgtagagatttcccgcaaacagcgcggcttcttctcctcccgctgctccgcggatctccatgattacgtttttgtcatcgttcgggtctttcgggatgaggagcactttcaaacgctctgataaggtttccgtctctccctgcagttcggagatttcttccttcaccatttctctcatatcggcatcaagcttttcctcaagcatcgctttcgcatcggcaagctgttctgatgcgtctctgtattgtctatagacttcaacggtttcttgtatatcagattgctctttcgaatattctctaagctttttcggatcgttgaccacttccggatcacttaaaagctcatttaatttttcgtatcgttgttcaattgactgtaaacggtctaacacggtcttcacctctgttttcctgtgcgtaacattctcattatagtatagggcttatcaccagtcaaaagcaattcgcctctgttatactgaagcaaaaaaggaggggcggatatgctgaaatccatccaccatatagcaatcatatgctctgattatgaaaagtcgaaagctttttacaccgagatactcggtttcggcattataaaagaaacataccgaaaggaacgggaatcttataaactcgatctggcgctggacggcgcgtatgcgattgaattgttttcctttcccgatccgcccgaacggccgaccagaccggaagccgcgggtctccggcatctcgccttcaccgtaaacgatcttgaagcagccgtcagggagttaaagaaaaagggcgtcggcacagaaccgatcagaaccgatccgctgacggggaaacggtttacctttttcttcgatcccgacaagcttccgcttgaattgtatgaagcgtaacgttttttgaagaaatgccgctttctttggcgaattccttcttgttttgtctaacatgaagggaacgccgcctcatggtcgaatacctagcaaaaaggaggtatgtgatcatgaatacaaacatggccgcgaaagagctcggcgtctccgcaaaaacggtgcaaaggtgggtcaagcagctgaatcttccggctgaacggaatgagctcggacattattcctttacacctgaggatcttgatgtgctgaaatcggtcaaacggcaaatttctgaaggcactgcccttctggacgttcaagtgccccggcagccgaaaaaacggacgggcttcattttgcagcgtccgaaaatcaatggcggcgctgaacaaaggttggcagagctggagcgcaaactggacattctcacgaaagagaaacaggatgagaaccatctgctttcaaggatagaggagcttgaacgccagctgaaacaaaaggcggatgaaggggtgtcttatcagcttcttcagcacagacgggaaattgacgacctcaataccgaattgcagacattggcctcccgcatccaggaacttgcccagacagctcccctctcagaaacagccgcttcttcagaacataagaaacccagaaaaaaaacgagattttcgccttttaaatttcaattctaatcaaaaaagctccctgaaacagggagcttttcattatgcagtcagcgcaatgatgatcggcagtgagataagagataaaatcgcactgatcacgaacgcggacgcagtttcttcctcttgtttttcgaaacgtgtggcaatcatcgccgctaccgcagatccagggaatgcgacgagcaataccgctttagtgatctggtcagccggaagtccgactgcaagagcgatcaagtacatcagcgcaggctgaacggcaacttttaacaaagcgataccgaaagccggcagactgagcttgatgttgcggataccgacagttacaccgacggcaaagagtgcaacacctgatgttgtgcttccgagctgatcaagcattttttcacccaagccagggagtgttacaccgcagagtaccaggatgatactgataagcggtgcagccgcaagcggttcggaaagaccgtgaagaatagacttaccagtcattttccagaagttctcgttttcgctgtcttgtttcttagatgactcaccgactgtagcgataatgatcgcaagcgggtcaaggatggcgttaaccacgatacccgtaacggcgataggaatcgctacttcgtttgctccgaataagcttccgagtaccggaatacccataaatgcaaatgtcggctgtgcagagtttaaagaaaatacagatgaattcgttaaatcatacttgaagataaatttgcaaaccaacaaaatgacgataaagaatccgacaatcccaatgatcaaagcgatcattaaaggaacctgtgataaaaacgcacttcttgaagtggttaaaatacttgcgataaaatgcgccggaagcgcgtacttcgtaactaaggtgcttaccccttttgctgacttcgcgtcataacttccgaagcgacctgcgaaccatcccagcacgatcacgaaaaagatcggcgccaggaggattaaaatatctaagaagctcaaaatattctcctccaaatccttaatgtccgtatactttagcctttacataaaagctttccctcggactgtaaaattaatcgtaaaaattatttagcgataacttgtttatattgcggtttccacattgcatcaagaacggcttgttctacattctcaggaatgcggtttgccacgccttctttaatggcagtttccgctacggcgatcgcaactttaattgaaacttcttgtaagtcgctcatgctcggcagaaggcctgcacccggtgtttcaaaatcaacgctttctgcgattgcgtcagcagttgccgcaaacattgcaggagtaatcactttcgcttctacaacgattgaaccgagaccaagtccagggaacgcgaatgcgttgttagattgtccgatttcatgagaaacgccattgtactctacattgtcaaacgggcttcctgtcgccacaagcactttgccgtcagtccatttgaatagatcgctaggaacggcttcagcaagcggtgtcgggttagacatcggcatgatgaccggacgctcaacgtgttttgccatttctttgacgatttcttcactgaacgcgccgctttggcctgatgtaccgattaagattgtcggtttcgcttgacggatcacttcaatgaaaggaatttgtccgttttcatcgcgtttccaatctttaatttcttcagctgtgcgcaggtacggctcttggaaatcaagaatgttttccataccttcaattaacaagcctctgtagtccattgtgtagaacgctttgttggcttcttcttcagaaagaccggcaagcaccatagtgtcgcggatttggtcagcgattccgattccggcagatcccgcaccgaagacaaccacacgctggtctttaatagacgcgcctgtttcttcatagccgcaagcacacctgcaagcgtatcgcgcctgttccttgaatgtcatcgttgaatgtaagaatttcatgattgtatttcttcatgatattgcgcgcgtttttgtttccaaggtcttcccagtgaagaagagctttagggaaatatttaagcgcagcttttacataagcgtcaatgaaagcttcataacgttcgccttggatacgttcatggcggttaccgatgtataaaggatcgttcagaagtttttcgttgttcgtaccgacgtcaagaacgacaggaataacacggcttgggtcaataccggcagcagctgtgtatacggctaatttaccgatggcgatgttgataccgcctacaccccagtcaccgattccgaggatgcttctgagtctgtcgcaacgatcagatcaatatctccggcagtggcatgaaggttttcaaatgcctcttcgattccttctacattgtcgatagaaaaggtaaatcccttgaggtcttctgtactcatggctgtattcttgaatcgcttcaccgacagtcggtgtgtaacaaccggcagcatttcacgaagatggttttgaagcaatttaaagaaaagaacttcgttacggttttgcaaatcattcaaatacacgttttggcgaaggcggtccggctgagcttgaaactgctcgtatgcgcgttttgcctgctcatcaagagacagaatggtcggaggaagcagccgtctaatccaaggctttttctttcttctgctgaaaacgcaacacctttatttaaagtagggatagtagaacttcttttcctcttaaagtgtttctaagttgccttccttcgtttactttaatatattcaagaaaatctccttctttcttcaaatagttaacaaagttaagtaattacccattttggctagtgtgatcgcgatctgctatatctttttttgacaattattcgaacaatgtctcataactatttacattacttagtcattttatgcctgtaaaaatgaaattcaagagatgaaaattacttaattttttcatactcttttttaagttaattaactacaatttttgaaaaacgtcaaaaaacaccggattttttaccgatgttttcatgaaaagggttatttatcgtctgttttttcagcacttcgtggtgatgtctgcatctcgcttcgtatgactccgacgcgccgactaaaatgaccggatcatcataggagcgggcttccgtcaatcaaacgctgcgtacggcttgccggcgacccgcaaacggagcagaccgcctgcagcttcgtcactgattcggcaaccgccatcagattcggcaccacaccgaacggctctccccggaaatccatatcaagtccggccgcgatgacacgatagcctttatccgcaagcaaggataaatcgccgatgattgattcgccgaaaaactgcacttcatctaccgcgatgacgtccgtgctttcactgatatgatcccatatttcagccgaagacgagatgacgtggcttgtcatggatgtgccgttgtgagaaacgacagcctcctcactgtagcgattatcaatggcaggtttgaacaccttgacctcctgcttcgcatatgtcgctcttttcactctgcggatcagctcttctgatttccagagaacatgctgcgcatatcagctcaagccatccgctttgcttcattatgtacataggctatccgctcccctttttttcctgtttatggacataaaaaaaggcaagaagcaattcttgcctgcctgtaaatctattattacttaagaccgtattttttgttaaagcgatcaacacgaccatcagcagaagcgaatttttgacgtccagtgtagaatgggtggcattcagagcaaatctcaacgcgtacctcttcttttactgagcctgtttcaaattcatttccgcaagcgcatttaactgttgcttttttgaaattaggatgaattcctgctttcattgtatccatctccttccgccctgaatcccgtgtggaaacagagttattattccggagcgaatccggaacgcatatgagagaattatatcagtcatttactgcatttgcaaatacattttttatcagcggcgggctgatgatgaaaggtttgcctgcttccattcttggttgatcagatcgaagaattcctgattcgtttttgttttttcattttctcataaacttctgcgaagtcggagaatcagacatcgattgcggatcgcccatagacggtcaagatgctctttcggcacgagcagctcttccttcgcgtgccgccggaaaatccgtctttccgcaagagcggttgcaaactctcatagatgacgtcatccatccgggagcccgtgtctacgagcgccgtcgttcagccgcgtttccggaaaaagcgcttcggaattcagccggaagcgtacccgcttggcgggataaccgtctgccatcgttccgcgaccgctcgcggaatccgccgcggccggtcggccggttttgtagagcccgtgccagcgggactgtccatcagaatgccgttttttttttttaacagcatggttttttactaatttggcatcgaacgtcgactgacgacatccgctacgaacccgaccttcggttttcatcaattaagagacgatcaattcagcgtcaggagatttgtcgtaatgtgttagcctttttaacagcatggtttccggctttcggcggagtcagaccgctggccgaaaccgacgggccatcatatttcggttctttcggcgggattcagcgcaccgcacggccgttccgtaatagcgttcgttttcttacgcaccttgccggatactttgtcaccgtttcttaaatcaaagcggcggatctgggaagcagaaatgtagatgtcttctgagcttggcgagtaattaatcggtctgaggaagccgaatccttccgattggatgatttcgagcacgccttccataaacagaagatcctcctgctcggcgttggctttcaggatggcaaagattaattcttttttagtcagtttgctgtagtaggagattttataatgtctggccagttcatatagttcttttaatttcatattttccaaagaggaaatagatacgtctttcataaaaacaccacgcttttcatagtcaatgtattgctgttttcattcaaatcggctgcttcgcatgattccgccaaagcacattcttttataaaacgttcaggaacttctatcggtaacacttccacccatgatcggcgcttttttaaaaaaggaatgtcttaatgagttttgaaggaagcgaggacaaaaacttgagaagatcaatatttatatcgtctgtatgcggtagaatttgaaaatttcccagtactcaaaagaaggaatgacacagaaaaatcgcagcactctttatttttacctcatttcaaaaaattattcaacttaaataatgctttgacatataaatgatagggttgactcttttttgcaaaagaaaagcgggactttccgtcccgcttttctctatttatggccggatcacaagatttggttttttcttcaggctgtgtcttccgtcaacgaatcggaccgttcctgatttcgcccggatgaccaggctttcagtcgtgccgacggagcctttgaactgaacgcctttcagcagctctccgtccgtgacacccgttgcggcaaaaatggcgtcatcccctctcacaaggtcctccatccggagcactttggatacatcaaggcccattcgctcacagcgggcctgctcttccgcactttgcggcagaagcctgccgatgatttcgccgccgagcgcttttaacgcaacggcagacagcgccttcaggagccccgcctgaaccgaagagaatgtctactcccgtatggtcaaaggccgtattgatggcgcccgcgacatcaccgtcgttgatcagtttgattctggcgccccctcacgcaattcagagatgattttttcgtgtctgtcacgatttaaaatggttgccacgacatcttcaatgtctttgtttttcgctttcgcaacggcttttaagttatcaatgacaggcgcttcgatatcgatgcagcctaccgcttcgggaccgaccgcgattttttccatatacatatccggggcgttcagcaatgttccatggtcggcgaccgcgatcaccgtcagcgcattccagccgccgctcgctacgatgtttgtgccttcaagaggatcgacggcgacatcgacgcgcgggccgtatccgtttccaagcttttcgccgatgtaaagcatcggcgcttcatccatctcgccttccccgatcacgaccgtgcctttcatcggcaccgtgtcaaacacgtcacgcattgcgcttgtcgccgcatcatcagcttcatcttttttcccgcggcccatccatctggcagatgctaaagccgccgcttcagtgactcgaaccaattccatcgataagcttctttccatttcaacacgatctcctctcaaaagtccgcatttctatgaattttggagctgttctatctcttcgtccgtcagcctttgccgccagattgtggcgcccagaccttcgagttttttctcaagattgctgtagccgcggtctaaatgctcaagaccggtaatttcggttacgccgtcagccatgagcccggcgacgaccagacaagcgcctgcacgcagatcgctcgcctttacttttgcgccctgaagctcggccggaccggtgataatggccgacctgccttccactttcatattggcccccatccgtctcagctcatcaatatgtttaaatcgggccgagtagatggtgtcggttacgacgctcgtgccgctggctctcgttaacagagatgtcatcggctgctgaagatcagtcgggaatcccgggtaaacaagcgttttcacgtcgaccggttttatctgcttctgcccgccgagcataagaagctgatcgtcactcgtctcaatgtaaaaacccatttccctgagcttcgccgttaaagactccaggtgagtcggtatgacattatcaataatgacttctttccccatcgcggcgccggcgatcataaaggtgcccgcctcaattctgtccggaatgatcgtatgcctgcatccgtgcagcttttacgccgtcgattctgattacattggttcccgcacctttgatctttgcgcccatgctggtgagcaatgtggcaacatcaataatctcaggttccttggcggcgttttctatcacggttttaccttcagccagtacagcggcaagcatgatattaatcgtcgctccgacgctgacgacatctaaataaatccgtgcgcctctcagcctttcggcgcgcagataaatcgcgccttgttcattggtgacttccgctccaagcgcctcaaaccctttgatatgctggtcaatcggccgcggaccgagatggcatccgcccggcagtccgatgaccgcctgtttgaagcggccgagcatcgcgcccattaagtaataggaagcgcggagttttttcactttgccgttgggaagcggcatgctgatcatcggggaagggtcaacgaccatttctcctttttcaaaatggacgtttccgccgatttctttcagcaggtcacgcagcgtttcaatatctgagatctccggaagcccttcgatcgttacttcggaatttgccagaatggttgcgggtatcaatgcgacggcgctgtttttcgcaccgctgatgtacggttccgtttaacggatcgccgccggcaatattcaacttttccatgatagtctccttccataagaagatagctgcggagcgtaaataaaatggcattttattctgtctctgcaaataaagctcttgtccaaaatgtagccaattcgaagagaaagaatacaaggacattataaaataacaggaagaaaatagcgaagctttgcggggcatttttaacacaggatgcacagaggcccgccgggttcatattccggggaaacacactcttcactttgatactgaaggcccgctgccaaacaggaaaacataagggtgcggcaaacggatgcaaccggtttgccgcccttttcccccttatttattccagtcagccaagaattgctcgatgcctttatccgttaacggatgtttcgtcagctggtgaatgactttcagcggcatcgtaccgatatgcgcaccgcgtaaagcggcttcagtcacgtgctgcgcatgacggatggaagctgcgatgatttgagtatcaatgtcatgaatgtcaaaaatctgtcttatttctgaaatcagttcaagaccgttatggccgatgtcatccacggcctaagaacggagatacataagtcgccccggctcttgccgccaaaagcgcctggttggcgctgaaaatgagcgttacgtttgttttaatgttcaggtcgctcagcgcttttacggcttttaacccttcagacgtcatcgggattttcaccgtaatattcggcgcgattttcgcaagttctttaccttcttcaatcatttcttcagcattcagggaaatgacttccgcgcttactgatccgctcacgacttccgtaatctcacgaagtctgtcatggaaagacacgtcagcttctttcgccactaaactagggtttgtcgtaactccggcaagaacgccaagttcataagcttctttaatctcgtcaatgtttgctgtatcaatgaaaaataacataaggaaagcctcccagtaataaattttcagaactgtaaaacatgattgcgctttctaaaggtaagacataaaaccgcctgtcaatgctgtcaggcggtttatggatgttacattggattaagcttggtttgaagaaccgaactcacgcattttgccgataaccgtttctttgatcgcttcacgagcaggtccaagatatttacgaggatcgtattcgttcggcttagctgccaatgtttcgcggacagcttttgcagaagaaatttggttttcagtgtttacgttgattttagccgtaccaagtgagattgattttttaatgtcggcagtcggaattcctgtaccgccgtgaagtactaacggaaggccggttgatttgccgatatcttccatttctttgaaaccgaggttcggttcgcctttgtaagggccgtgaacagaacccagtgcaggtgcaaggcagtcgatgccagtgcgctctacaagttcttgacactctttagggtcagcatagattacgccttcagcgatcacgtcatcttcctgtccgcctacagttccaagctcagcttcaactgaaacgccgtggaaatgagcaagctcaaccactttagctgtagttgctacgttttcctcaaacggatggtgagatgcgtcgatcattacagaagtgaaacctgcatgaatcgctttcgcacaagattcaaagcttgaaccgtggtctaagtgaatcgcgacaggaactgtcactttgtattcttccataagagctttaaccatggcaaccactgttttgaagccgcccatgtagcgtcccgcgccttctgaaacaccaagaataaccggggatttttcctcttctgctgcttgtaaaatagcttgagtgaactcaaggttatttaagttaaattgt
